United States Patent Application Publication US 2026/0191916 A1 - sequence listing, part 55

SEQ ID NO: 250 - DNA, 1129986 bp, Bacteroides thetaiotaomicron
  source 1..1129986: mol_type = genomic DNA
tatggaactggcacagctttattctcccgaacttacgggcattgccgcttaccgcaaaatgaataaatggattgtccgctgtcccggtcttcaggaacgcctgtccgatttgggctatcagccgcagcaccgttcttacactccgttggaggtaagggcgatcgtagatgcgttgggagaaccatgagcaggtaataagtattaggtaacaggtaataagtgttgtagactgcgaggggcgtttggtattggctaaagctatgctttacgacttctaaagcatagctttatggtatctaaagcggtgctttagcttctacaaaacgttatatccctatgacacaaagttatcaaccgatgcaaaaatgcacttttacggggcatccctaacacacgcacacacgtgcgcgtacgtaagtccccttttctttcatggcaaagagtcccttttttacgagacgtctcagccaagagagtgcggtgttggttttgattcccatagctgtagcctgttccgtcaactgtgtacgggtgaactcgtcacccagcgcatcgaagaaggcgtcacggtcggcattggccctgtgtgggatttccgaagatggcaggaaagataatatatgcgtggcatgccgatagagaggctttacaagcccaagaacagctttaaagtcttcaggagtgatagttatatcccaacgggtaataatgccgtccttgacgttatctgtgggaatttccttgtccggaacaggagcgtatctgtcagaactcttaagctgatagggttgggggatttccaacacccgcaacatggctatcgttgacatgatgcggcagatattgacagccagacgggctatgaaacttctcatttcgttgccattggcaatgtccgaacggaaaaacaaatcggagaagagagcgttgaattcctttttctgctcgtcggtgaggcgaagcgtatggatgccgtgttctttcagtatatccagctttagttgccaatccctgcctatggacctgaagatttcgtccagatctatctctccgcacgcaaactggtcagcccatgtatagatgccgtgcatatagtagaacagttggcgggagaaaagtccgttctccgccgacgggatgagggctctcacctgtgcgggtgtccccgaaagcaggacggcaagaaagattctcttcacttcccggtattcctgatcggtacgtcggttgtaggacagtctgtcatggtcgaaggctttgcggagcgtgtcgctccaatgcccgtattcggagctgatggcggaggcgatggtgtccgcttcggtttcgcagatgagtcctgttccgttggcgtccatgatattttgcagaataccggtaccgctgttattgcctgagataagaaacattttgttgggaggcatctgaggtgcttctgtattgacacgttctttgcccagcaactcatagtttttcttttctttccggtaggctttcatttcttcgtccacttgttggcgaattttgtcatgaataggttctacgagcaggcggataagtgaaagtccgcttttacccgaagcaggaggggctacaaagaaggtttgcagacaaggagactggtattttccggaataggaacatctcacatagcgttccatcgtagctcctagtgcggtcagtgctccgagcaagagtatgtcccgttgtgtgggagaagtggcatagctcagaatgagcatcaggattttaggccagtctgcttcggggaaagtaggcagcggttgtagaggatcgctgtctgtcgagagttcttctgaagcgttggcgttttcgtcgttgtcgttttcttcctcttcctcttcctccttattatacgcgcgcctgtgtgtggagaaattgtagggtgcatttagtgcattttctgcattttttcggctgttcataacttcctcccggcagattttcactcctgtcgattctgcgagatgaaaagccgttcccagatgtatttctccatgctgctttataagggcgttggagaacattcgttcggcatgctcacgctgatatttggcggatatccggcacaggcggtgaaaaaactcgcgtcctgcttcgccacagtctgttgcgatggcgaatgctaattgtacgtactcggcgtaagagggtgcaatgtcggcacctgccgtttcgactgcctcagtgatgaggcgtaaagattcaatattggtcattttttttgaattgacaattgacaaatgataattgacaattgaagttgatcattcgtgattataatttaatactctctgaatagtgcttgtgggtcgtggctgaggaaacaggctcttacgatgtctttgccggaggtgtctacggcttttggcggagtttctgtggagtcgtccatttctgatccgtaggttatttctatgtattgcattgcccagtttatgctttcttttacgtttcgtgtctgatcgtctacgtagagtttgctataaggtacgaatgctttcacgccccggccgctgggactgatgaatgtaagtatggggcagaggaaaaggtcgtcgaacagtgtacgacgcatttccacggctttctgataggagtcgaggttatctatatctaccactacgagcccggaaggcgatgcgaagaatttactactccggcggatgaatgtgccgcatggggttacgtaggggagtaaagaggcttttgccattcgcaggtctccggcaccgcgtacttgttcggtcagtgctttgaggttttcgttgcaggtgatcatctgatatacctgttcgaccgaaacttcgcagaagggagtgagtgtggcgggtgtaacggtttgtccttgttcgttccttatgggagcaatcgggggcatgaaataagacattctgaaattgtttgtcataacatttatcgttaattcttttaataatgcggttctgtttttgaaacgcagcgcaaaattaggacaaagtgatataacggcagttcggacatatccgaactaatgtgaatatttttataacaactaaatcattattaacgtttaaaacaagaaaaaatgaaaaaagagtatcatcattttgcattcggcctttttatcgaagaggtacttaaatgtgagaaagtggttgtttcagccatgtgtcaagctataggcatgagtaaggaaacttacgaaatgctaaaaaaagggatgataagtgtttgaactattacgagcgtatatttaattattactatgatacgctcacagaagaggagtttctgaagaaaatgcatgagtggtcactgcggtatatccggtataggaagagacgggaggaagaaaaagaatccgtacgtaaactctcggatcaatagcagattattcggttattgataacagtcaggcacggattttgcggattacacggttttaaagttgagtaactaaaaaccgtgtagtgccgcgaaatccgtgcctcaataataaactttaattaccttatttcttctccggtagtgtaacggagaagtgagggttaggcgtgtgttgtgcaaagataaccgccttcatcttttctacaatctccggatgctggtcggccacattgttgtcttcatgaatgtccgttgccagattataaaggaaaggtacccctttctttaccaccatcttccagtctcccatgcgtacgccaatctgatttgtttcattaaattcccagtaaaggaagtcatgttccttctgctttttctttcccagcaatgtcggggcgaaggaaatgccgtcgaagtaatctacttctttgtctttgttcgcatatttctttacgtaattcttttcgccgatgagctcgcagaaagtaggcatcaggtcgtagaaagcgcagatatgatcgttcactgtaccagcaggtacatgtcccggccagcgggcgataaatgggatacggatacctccttcatagcattggcgtttcaagccacgcagtttaccgtctctgccgaagaatgtaggatcagctccgccttcttcgtgagggccgttgtcgctggagaaaatgaccagtgtattctcgtccagtcctttctctttcagctttttcagtacttctccgacgtagtagtccagtcgcgtaatcattcctgcaaattgtgcgtgtacatgcgtgatcgcgttgtatcgcgatccttcgctgcctttgtagctcttgtcaggattgaatttctctttatattcatttaagatagagtcttcgggctgaactagttccgcatggggcagggtataagtcagcactccgaagaacggttgtttgccgtcctgctcatccagccattccattgctttctggtgaatcatatccgccgaatattgcgggcgtttttgataatcggcaccatacatcggatacttgatgttctcgtccatgatgacacgtactacgcctgtgtcacctaatgccttgctgtaacggttgaggaaattaggatagtaaaggtgggcctggaactgacagatatagccgaaatattcgtctatcccgcgtttgtccggagtagagcaggaaccttcataacctcccgcccatttgccgaacataccggtggtatatccgttctctttcattatctcgggcaggataacgtgatcggggtcataaggatgctgacccactaccgagaactctttgttgttgccatacatcactgtggatgcattcgtccaatattccttgttgccccgtacttcgcaatgtcctgtatgctgtcctgtcataaatgaagctcgggaaggagcactgacgggacttcctgcgtatgcctgtgtgaagcgcataccctcgcttgccatcgcatccagatggggggtgcggatgaatggctgaccgtagcatcccagatcgccatatcccatgtcatcgcagaggatgaagaggatattcggctttgtgttgtttttctgtccgctggcagacagactggaaagaataagcgtaccgcttactaaagaaaataatttgtagttcataaaaataatgtgttaagaaatttatatattaggggttttattgattaatcgtttttgatgtctctctcttatgtttctctttatattgagtcggtgtttcacccgtgtactgcttgaaggtcgtactgaaataacgggaagtagtgaatcccactttctccgcaatttccgtaaatgacatttccgtgccggtgatcagtagaattgcctgctccatccggaacttattgatatagtcgttggctcccatgtccgtcagtgccttcagtttgttgtaaagagaggcccggctcatgccgatttctttgcagataaaaggaatatccaatcggctactgtccagattctcctgaatgatcttgttcagtttgagcaggaacgtttcatccgcctggctgaaggtgctttcttccggagcggggatcagtcctgcgttcagatatcttttcttggtatgttcacggtttttcagccggttacggatcagctccatcagcatttccacttcgaacggtttggtcagataggcgtccgcaccgtttttgtagccgcttatctgactttgtttgtcgtctcttgccgtcagcaggataacggggatgtgactgatcgtaatgtcttcctttatgtttttgcaaagttcatatccgttcatgcgcggcatcatgacgtcactgacgatgatgtcgggagtatggcttttgataagctggagtgcctctacgccatccgaggcaatcaatatacgtttgaagtattctcccagtgctttctttaagaagtctgtcaggtcgggattgtcgtctaccaccagaatgctgtagggagcggtggcgaagctgtcttcctcttgtgactgcttgccgctgtcgtcgctcattagttcattcagatacgccttgggctggcagatgatctcttccgattccagtttcagcggtagttcgaagaaaaaggtagctcccgattccgaattgtcccgtgcgccgatggagccgtcgtgcagttctaccagaatcttggagtaagacaagccgatgcccgttccgctctgttcgcccatgccctgataaaagcgggtgaagagtttctgtgtatctacctgctgtaagccgcagccttggtcggtaatggaaatgcgtactcttctctcttcgggcagcagttccgaagtgatggtgatttccgtgtcttgtgggctgtgtttcagtgcattgattagcagattactcagaatgatttcacatttgtccttatcgaaactcactatttcgatgcgtggatcgagccggtaatgaatctgtatattctttgcttccccttcgctgacgaaatcctgcgatacatgttcgatccattcgttgagcgggtgaggctgtatgagcagtttgctttctcccacttccatcttgcgcacatcgagcaccatgttgatcagattcttcatccgctgagactgccggtaaatcgctttcagcggcaggtattgggtatctgccggagacaaggactttaatatgcggctgagcggagcgtggatcagtgtcagtggagtacgcagttcgtggctgatgttgatcaggaaacgtactttttcttcgtacacctgttgctcatgctctttcatggcccattttaatttatcttcttttcgcttcagtgttctccggaaagtttcgacaatcattccggttactaacaaggcacagcccagcgtgaaccaccatgtgcggtaccagggagggagtacggtcagttccagtatctgctgactgggaatccagctgccgtcctttgctgtgcaggaagccataatctgataatcgccgggcggaagcgagcggatgaccagttccgggttgtacgattcgatctgctggtcgttcagcccttctatctgataccgatacactttctgccggaagatatcctcttctttggacatgatacggatacttatattactgttccagggaacggaaattccggtcgggtcaccgcacagttcattgttgacggattctccgttgacgatgacatccgataattgcagtttgggcagctcggaagtagccggcggcagattgctgttgatatgcagcagtcctttgacgccgcccatgtagacatctccgtggctgctcagcagacggggtttggaaagatattcgttttgaatggcaccatccgattcgccgaacagtacgaatttcttttctttgatgagccatgcgaaaagcatgtcattcgttccgaaccatacttttccctgctggtcgcacacgatgagcgttacttccgtgaatagcgtggtggtaaagggagtacgtactttggtagcgggattatagtggatcagtccgtagttgctccctatccagaagtctccgtattcgtcacgcgcaacggaattgatgaccgtatcgttgaagcaacggaacagagacgtcaggcggttgttccgtttgtccagttggtagatacgtttcgtatcgttgagataggtatagttttcgtgattggtgatgggcagaagagcgccgatgatgtcctgtccctcctgttcggtggcaatccggaaagtgcgtttgttcaggtcgtattgatagacgtggtcgccgagcagcagcacgttgtcggggctgttttgatacaggttgaccgcttttccccgattgcagaggcgggtggtcgtttcgtcgtcaatgattgtgaacggttgtttctctccggtagacggattgaagacgaacactccctgtgagaagagcgagatcagtagtttgtcgggagtgaactgacagatagatgccactttgtcttcccacgtagagagataatgggtgaacttctccgtgagaggattgaaaaggttgactccgcctccgtctgttccgatccatattttatcgtcggactgctgatagaggctgaggatggtgttgttgctcagtccacggtcgttgccgggcactacgtccgtgtaggtcaccattgacacttcgcggatgctgatcagtccgttccggatacttcctgcccatatattgttgttacggtcgttgtagaggctgaggatggagttggcggggagcgaatagttgtctctgccggggatgtgttccagcagggaaagctgtccggtttccggttcgaggatgttgataccgcctccgtccgttccgatccatagtttgttctcccgttcggcaaggctgagtatgacattgttgctcagcgaggagttgcgggtggtgtatgatgccagttgttttccgttccggtcgaaacagtagagcccgttattgtagggggcaatccatatccggttcttcgagtcgatgatcatgctcataatctcctttccgcagtcgaaaggcgggcggctgtatgctccggttttcaggttgagcaggagcagcccttgccagcggctgcaacagagtacagtttcttcatcccaaaggctgagtatcgtgatattgaagtttctgaaatccggtgtctggtcgaattcctgcagcaggcggaaagaaccgtcccggtagctgtaaaagtaaattttgtttttggctccgaataataacccgtcttgggtagggcaggtggaatatgcggtgatgttctttcctttttcgtcggttggcaggtagaagtcgtcactttgccgttggtagcgtgccacccctttatcagtcaagatccagatattgtattgttcgtcttctgcaatctgaaggacgaggtcgtgaggcaacgaatgcggatcgtctgcatgatggatgtatttcttcagttcgtggccgtcaaaccgtcccagaccggagcgggtgcctatccacacgaatccctgttcatccgtaaggatacaccggacggtggaaggtagtccttctttcagagaaatctgcttgtaatagtaatgccccgcctgtaaaggaaggacaccggccatttgtgtgataaatgcgatgcataggacgatatagagtcttgctttcattgaattaggtcgagtaaacagaagcaaagataatacattcggatgaatattgaataaaatgatatagagttttgagcaaagatgatattaatttatctataatctttatctttgctcgaaaatgtacgactatgattaccgaagaactacagaaactatatcaggaatatacgggagttcccgcagagaatataacagaattaccatcttccggttccaaccgccgctacttccggctgacaggtgcgaaaaccctgatcggcgtatgtggcacgtctgtcgaggagaatgatgctttcctttatatggcagcccatttccgcaagtccggcctgcctgtacccgaagttcatatcgtttccgaaaataagagttactatcttcaggaggatttgggagatacccttttgtttcatgcaatcgagaaaggacgtgctaccagcgtattttccgaagaggaaaaagagttgctccgcaagacggtccgtttgcttcctgccatacagtttgccggagccgacggcttcgacttttcccgttgctatccgcagccggagttcaatcagcgttctatcctttgggatttgaattacttcaaatattgtttccttaaggctaccggcatggaatttcaggaagataaactggaggacgactttcagaagatgagtgatgtgctgctgcgcagttcttccgctacttttatgtaccgcgattttcagagccgcaatgtgatgatcaaagacggtgagccgtggtttatcgactttcagggcggacgaaaagggccgttctattatgatgtcgcttctttcctgtggcaggcaaaggcgaagtatcccgatagtctccgtcaggaattgctgaaggagtatatcgatgccctgcgcaaatatcagcctatcgacgagccctatttctatagtcagcttcgtcattttgttcttttccgcacgttgcaagtgctcggagcttacggtttcagggggtattttgagaagaaacctcattttatccagagtgttccttttgctatccagaacctgcgtgacttgctcaaagaggcgtaccctgaatacccgtatctttgcaatgtgctacgcgaacttaccgaactcaagcaattcaccgacgatctcaagaaacggcagcttaccgtcaaagtgatgagttttgcttataagaaagggattcccgatgatcctaccggtaatggcggcggttatgtctttgactgccgtgccgtgaacaatcccggtaagtacgaacgctacaaacctttcacgggactggacgaaccggtgatcagttttctcgaagaagatggtgaaattctccgtttcctcgactctgtctatgcgttggtagatgcttcggtgaagcgatatatggaacgtggcttcagtaatttgtccgtttgcttcggctgtaccggaggacagcatcgttcggtttattcggcgcagcatctggcagagcacctgaaccgcaaatttggcgtgaaagtggagctggtgcaccgcgaacagaatatagaacgtacttttgaggcaactgtgtaatgaaagcaatgatatttgcagccgggttgggtagccggctgaaaccactgaccgatacgatgcccaaagcccttgttcccgtggccggacgtccgatgctggagcatgtgattttgaaactgaaagcttccggttttaccgaaatagtgattaatatccatcatttcggtgagcagattattgattttctgaaagctaacaatgatttcggactgacgttgcatatttccgacgaacgggacctgctgctcgatacggggggaggaatcagaaaagcccgtcgattctttgaaaattccgatgaacccttccttgtgcataatgtggatattctttcggatatgaatctgaaagaactgtatgactttcatttgcggaacggaagtgtagccaccttgctcgccagccggcgtaaaacttcccgttatctgctttttgatgcggaacaaagattgtgcggatggatcaacaaagatacgggacaggtgaggcccgaaggtttcctatatgatgagtcgctgtatagagagtatgcctttagcggtatccatgttttttcgcctgctgtcttccagttgatggaagtgccgtgctgggaaggcaagttctctattatggacttttatctggctacctgcgggcaaacggattattgcggttatcttacggaaaagctggaactgattgatatcggcaagccggagacgttggcacgggcggaagagtttttaagagagaatatagtatcatgagtatattcgggtaattagagttaatgaaaggcggagatattcggaaacggatattgccgcctttctttttttgtctcgaaagttgtctgataatgtctgttgacctcgaaaaatgcgataaaatggactattttagacatttttggaagaatcatagccaaaatcgaacatcttaaatcttagatataacctaaatttgtggcagtgaatgtcaggaaagacttcgctacttatataaaaggtaatcttaattaataaacttatgagaagcaaattcctatttctttgtctcttcctttttggaatgttgacagcttgcaaagacacaaaatgggtagatgttcctaccggtactcctcccgaaggttcagttacgggaaaaccgggcgaaacagaagaacccgatgatcctgatcctacagataaaacatttatcaactgttcttatatccgtggtgatttttttgaaacgaatcgaatttcgggagcaagtatgggtgcttgcaacgatttgatttatctgacggcacgtccttatgctgatggtgatctgacttttgacttacccgtgaatgatgcaacacttacaggggcagcaacgtatgctgcttcttataatggacgcaacggagtactcaaattggatggtaccggcaagatgaacgccggcgacggtctgttgcattcaccggacggagcattcaagaaattcacattcggtacttatatatatgtcagcgagtgggtggacggagcttgcttgtttaaaaaggtagacggcggttctgttgtcatcgctttccagttgggagcaacggaaggtaatttgaaactgactgtcggaagtgctacggccacagtgacgaatagcgcattgaaatcaggagcatggcattatgtagcggtgacttatgatggtggcgctgctaagttatatatagatacgaacaatactgccactgactttacaggctctctgcctgcttcggttcctaatacccgtgctgactttgtgatgggagagaacctgaaaggttatctggatgaaacatttgtgaacagtctgctgatgggtacattaggaagaaatcccatctcttttgataattggaataacacgaaaacacttgcttactggaaatatgatgacgctgcaaaacctggtaaggactcgcatacatgggctattcgtctggagcagattcgtactgccttgaatggacaggcaggtgaccggaagatacgtttgggtattgctggcggcgaatggttgaaaatggtcggcaacgcaactgcccgtactaactttgccaataacgtaaagaaggtgatcgagcaatataatttagatggtgcggacctcgactttgaatgggcttattcaggtactgatttagccaattacagtaaagccatcgtgcaattgcgtgaagtattggggaaagatgtatttttgaccgtatccctacatcctgtttcttacaaaataagtgcggaagctattgcagcagtcgattttatctcgttgcaatgctatggaccttcagtagaacttttctctatggaacgtttcaaatcggatggtaaagctgcagtcgattatggaatacctcaggataaactggtcatgggagtacctttctacgggactacgggtactgccggcgagcaggctgcttattttgatcttgtcggtaagggtaacctgactaatacttctgcagacacatggagttatgaaggaaagaactatacgctcaacagccagaatacgattcgccagaagacacaatatgtgtgtgagaatggttttggaggaatcatgagctgggacttggctacagacgtagacgtgacgcatgagatgtctttgttgaaagcagtgaaagaagagcttgattactatgccaatcctactgtagaataaaatagaatcttaattagtaaatataatattatggaaaaaaagaagttcgtgagaaaacaagaacgctttgttctgtttctgatgctcctgttattatttcctctgggtgcgttggcacaacaaaaattgataaagggacaggtggtagacgaaatgggagaacctattatcggtgctacagtcatggtaaaaggtgtaaccggaggaacgattacagatattaacggtaatttctctattcaaggaaaagtaggaagcactctttctgttacatatgtgggatatgccccattgcaggtaaaagtcactaaacaggaaggtaacagactggtgatgaaggaagatgctaaggtgctggatgaagttgtggtggtaggtatggatacacaaaaaagaaataccattacggcagctgtcgctacattgaaagatgacgcgattgtgaatcgtcctgtgacggatgttaccagtgctttgcaaggtaatatagccggtttgaactttgcttcggatgcagtaggcggtggtgtcggtggtgaaatcggtgccgatattaaattcagtattcgcggtatcggttctattaacggtggcgagccttatgtattggtggatggagtggagcagagcatgcagaatgtgaacccggccgatattgccagtatcagtgtactgaaagatgcttctgcttctgctgtatatggtgcgcgtgctgcttatggtgtggttctggtaacaacgaagagcggtaaaaaagaaagagccagtgttacttatcgtggcacggtaggtttcagtgcacctatcaatatgcctaaaatgatgaatgcgttggaatacgctgcgtataataaccaacagtatgataatggaggagcttcatccggtttgcaaaagatttcggataagacaattgagaagattaagggatttatgcagaatccttattcggctgagttcccggggattgaagcgaataccaccggtgatgactgggcaggtgcttattataatcaatacggtaatacagactggtttgaatattatttcaaagacaaatctgtccgccattctcacaatttgagcgtgcagggaggttctgataaagtaaactattatattggtatgggatatacctatcaggaaggtttgctggataaggtacaggatgatctgagtaaatataacctgaataccaagttacagtttaagacaagtgactggctgcgcttcaacctgaataacaatattactttgcagatgatcaaacgcccaatggctaatcagatgattctgtataataagatcggtagccaccgtccgactcaggtgactgaactgccagttgaatcagaatataatatacctagctggaatgaaatgttgtatctgaaaaattccaattatcagagaaaccgtatttcggatgccttgtcgttttcggctaccgtaactcctttggaaggttgggatatcaccggagaaatgaaaatacgttttgatgttgaaaataataacctgaaaatgaaagatgaccagaagtacgaaactcctgcaggcactttcaaaccgggcgatgctactaatcagcgacaaggatttgcttatccgggcattagctggaaaaacatgtatttcggctcttacacacgtggtagcatgtttaattattatctgtcgcctaatctgtcaagttcttatactcaccagtggggagatcatttctttaaggcaatggcgggttaccagatggaattgcaggagtattcggaagaatatatgtataaagacggtatgttgagtaacgatatttattcatttgataatgccagcggaaatgtgatagcaggtgaagcccgttcacactgggctacgatgggattctatactcgtctgaactggaactacaataatatttattttctggagttcagcggacgttatgatggttcttcccgttttgctccaggccaccgttggggattcttcccgtcattctctgccggttatgatattgcacgcactccttatttccagcaattggcacttcctgtgtctcagttgaaagtacgtgtatcttatggtcgtctgggaaatcagaatggtgcaggtctatatgattacattgctcaaatgccgttggatgcacaagggaccaacgcttggctgctgcctggaatttcgtcttccacggcgtccaaaggaacaattgccaagactccgaaaatgatcagcccatacatcacctgggagaaagtggataatgccaacttaggttttgacttaatgttattaaaaaaccgcttgtcactaactgccgacttctaccaacgtacgacacgtgacatgattggtccggcagagtctatcccaagcatcagtggcattgcttcggatgaccgtgctaaagtgaacaatgccactttgcgtaaccgtggttgggaactttctgtaagttggaatgataaactgaaatgtggttttagctatggagtcggtttcaatgtatttaactacaaggctgttgtgaccaagtataataatcctgaaggtatcattgtcaataaacaaacagacatattaaagatgaaaataaaatccaaataagtacaagcaaataggctttatatcagacatttataaagaaatcgtttctttcagtttttttcgctattttctgttaattagttctttttgggtacatttttgttccttgtttgtttcttgatttcggttttaattcgtacatttgcatacgaaaaagaacgaatgaaagaatacgattatgccacgaataaagaagcctaaaaaagtaaaagagcccatccgtcttcggatgaaggatttgtccgatggcagcaaaagtctgtatctggatatataccgcaatggcaagcggacatatgagtacctgaagctgtatcttatcccgggaacggacaacaatacccgtcggcagaatgaaataacaatggccgctgcgaatgccatcaagtcgaaacgcattatcgaactgaccagcggcgaagccggtatcgtgaaccatacagataaggtttatctgctggactggatgcaaacctatttggagtaccaagagaaacgcgacaagaaaggcatcggtcaaatcaaggccgttacccatatcctgaaagaatatgcaggggaaaggtttttgttggatcgggttgacctcgctttttgccaaggctatatcgactacatgctgacgaccttccgccctaaaggaaagccgatagcagcatctacacgcaatacctattatcagatattcaacggtgccctgaacactgccgtccgggctaaacggttgttgagaaatccgtttaatgaaatggaaaaatcggagaagcccaaaatgccggagagcgtgcggtcctatatgaccatcgaagaggtacgggcgttgattgccactccggtacaggatgggagggttaaaaacgcctatctgttttcctgcttctgcggactgcgtatcagcgatattgtcggcctgaaatggaagaatgtctttgtcgataacggccaataccgtctggcggtggctatgcagaagaccaaagaaccgatttacctgccactctccaacgaggcgttgaagtggatgccggagcgtgaggacaaggcggcggatgaccatgtgttcagcttgccttcaaacatcaaccagtatctcaagccgtgggccgaagcggccggaatcaccaagcgttttacttttcacacggcccggcacacattcgcgaccatgatgctgacgctcggtgcggatctctataccgtatcgaagctgcttggtcatacctccgtgagaatgacacaggtgtacgccaaaatcatcaaccagaaaaaagacgaagcagtcaatttggtcaacgggctattcgactgatgtagttatacatgtcaaattcaatttacaggtaaatatttccggcttttctccgacttttcaaatagtcgaagtaatgccactattataataagtataaacccataaaaacaattcgacatgaaaggacaaaacaacaggtcctctctttttttgaagggagaccacatctgcaccacttcgctacggaacaggatgtagcggaagaattttacgaattgctctccgaagcgagggagctttatcttcaagacgtcatggcaggcggcaaacggtatggccgctatgtggatgactttataaacagtcaccggtacatcgactgcaacagtgcggtttgcaggaattgccatgaaatgaacatccatatcatcagagggctgttgatcgattgcacaagtctcgtcaaaagcctctttaccgcagaaacattttctttcgaggagtgcatggccttgaaacgaaagtacgacattgccggagtatggttcggctcttcacgtatagaagattccagaaacgatccacctctctccttcggttgtaatttttcccgtgaacagatgacaggtattgtggcttgcgccaacgcttatcatctgttttgcgtttccacactccgcatcgaggacatggaagcgctttttgcctgcaagaagggcttctgcatacgtgtgaacaatatccgccatgtggcggtcctgttcgacgcgttgctcgaaaacaccttcatcctgcctcactggcagtcggttctcgacaaggggcggttcctgttgtccaaagacggcacaagatacgttaccgcttcaagcctctcgtccgccctgtctgcggcgaggaacaacattacatcggcaaacctcggcatacgaaaagccgtcagccgactgaaaatatgacacgaagtgccaaaaagccaagtatgtgaaagataaaacagtgacagttgccgtgatacgtgcatagtatcacgccggtatttccggctgtccggttcacatcacataactttgacctccgttagcgcgctgcataacggaggtaactctccattgtctaattttaacatgtattttatgcaaaacagaacaacattcatggagcggttgagcgaacggctgaccgccatagaagcggttctcaagaagttggaaccggtggaaggtctgttggagcgtgtggctttgctggaaaataccatttacacgaccaagaaggtcttcacttttcaagaggcgtgcatgtatatcggcgtgtccgaaagtatgttgtacaaactcacatcgaacaaggaaatcccgcactacaagcctcgcggcaagatgctctactttgcgaaggaagagctggacgcgtggctcttgcaaaactacgaacctacggtggacgatgccatgcgtatggcgacggaagtgtccgcaacccaaccgttctttaaccagaagcgctatggaaaacgaaaaaagaactgaccgtaactcgtgggcggagctggacgagaaccgcctgtcggatatcctcactgcatcgcaaataaaggccacggacacctacgagactccgccccagattatatggattgacaactccaccatagcgacgctcggtaatttcagcgcttcgacgggtaaggcgaaggcgaaaaagacgttcaacgtctcggccatcgtcgccgcgtcgctggcgggccggcaggtcttgaactatcgggcgcacctgcccgaaggcaaacgcaggattctgtacgtggacactgaacagagccgtttccattgccacaacgtattggaacgcattctccgcctggcggggctgcccaccacgacggacaacgagaatctcgatttcatttgcctgcgggaatacactcctgccgtccgtatcggggttatcgactatgccctgcgtcagaacaaggggtatgggctggtcatcatagacggcatccgcgacctgatgctcgacatcaacagcaccagcgaatcggtggaggtcatcaacaagatgatggagtggtcgtcgaaatacgacctgcacatccattgtgtgctacacctgaacaagggcgacaacaatgtgcgcgggcatatcggtacggaaatgagcaataaggcggaaacggtgctggtcatcaccaaaagtgcggagaatcccgttatcagtgaagttcatgcgctgcatatccgcgagaaggagttcaaaccgttcgccttttccgttgatgacgaagggttgccggtcatggtggataactattcgtttgacggcagtgtaagaccgaaagcccggagcagcttcatggatttgtccatcgaacagcaccgggaggcactttccgccgctttcggggacaggcccatcaaaggtttcgagaacgtgctgcaggccctcatggcttcctatgaggctatcgggttcaaacggggacgcagcgtcatgataaaactgctgcaatacctgacggaaaacctgaagctgatcgtcaaacgggacaagctcttttattacgatgtgaccccgaccgaagccctgcttttcgacgaagaatgcgaggaagcggaaggtgaaaaataatttagtttactttggtccgggtatatataggagaaaaaccaaagtaaactgttttttgaaaacaagtgaaaagaaaatgacatgaccatagcggaagcaaaacaactgcgtatcgtggactatctcgccagtctcggctaccatccccagagtgtgatatcaaaacaatactggtatctgtcaccgctgcgcgatgaacgcactccgtcgttcaaggtcaacgaccggctcaacgaatggtatgactttggcgcagcgacgggcggcgaccttgtggaactgggcaaatacctgtaccggacgaacagcgtgagcgaagtgcttgcctgtatcgggagacatgaaaatgctgccccgatacaaagagtgcggattccggggacaacaccccgtcccgtcgaagctgacatgaaggacgtgctcgtcgtgccgttgcagcaccatgcgctactctcgtaccttcattcccgtggaatcgacggggacatcggccgcatgttctgccgggaggtccattatgaattacgtaaacggcgctacttcgctcttgccttcggcaacgcggcgggcgggtacgaggtgcgcaatccttattataagggctgtatccggtgtaaggacatctctgtcatcaggcaatctcatggtgaaacacagaaccgtgtttgcgtgttcgagggcttcatggattttctctcttacctgacgctgaaacaggcgggtgatgatacggtctgcatcgacgcaccttgtgattacctcgtgatgaactcggtgaacaacctgaaaaaagcattggaacacttgcaggtgtacgaggaaatccactgttatctcgacaatgatctcgcagggcagaaaacggaagagaccatcgccggcatgtatggcgggcgtgtacgcaacgaagcaccccgttatcgcgaatacaaggacctgaacgattacctacgcggaaagaaacggtaaggcatcatcgttaccctttcccttgaaagctctcctcccggagggctttttttatgcccgatttttctgcttcgatacctcaaagtatgaaattaaagttcaattttagtgtttcaaacttatttctatgtaataaaatactgtttgatataaagagtttttgttacatcaaatataatatttttctttgcaaccgtacttttaaagttcaattaaagtttaatttcatacttaaaaacagatgggttcatactttatattcgcccttgtactgacggtgctgtacatcgtctatttcgcggtcaatatcatccgtgacctgtatggaaagaagggaacggagaagactgacgaggaagttttcgacctcggtccgatggattccacggaagagagtgtcgaggtttcggagaacgagaccgggttcaaaatcggaaatgaaacatacggcacggagactgtacctgccgcttcgcctgccgcccaaaacggcgacaccgggaaaaaagatggaacagccaaggatcggctcgaacggctgaaagccaaggcagaggcacagatggaaaaggtcgcaccctacctgtccgacggctttaccgacgaagagatgtataaggcaatgatttccaaaggacgcttggacaaccgtcccagcctgaaatggagaccggtcaaagataagctgtaagatgtcgaaaacgaagaagatactatgtgcgctttgttccatcatcccctgttcggctctggcgaaaagcggcagcgtgaattacagttggggggcggatgcgctggcgacgatgcacgactacgtggtaacgatgatgttctacgtccaagctctctgttgtgccatcgccgggatttgtgtgattgtgtccggattccagatttacgtaaagatgaacacgggcgaggacggtattaccaagtccgtcgtaacgcttgtgggcgcgtgcctgttcctgatcggtgccttccttgtctttcctgcctttttcggctatcgcatatagaaacgggatgcaggaatgaggtgccgccataacgattcgaaagaactgcaatacttaccctaaaataaataatcatgtttcaaaaaacaaaaagacaaatgaaaagaatgttttctgctaaaaaggtacagatgctcacactgatgttgctgtgtggcacgacggccgtcatggcccaaaactccgcaggcgattactccgccggtacgaccgcactggcgaccgtgacggaggaaatcgccaagtacgtccccgtcatggtcaaactgtgttacgccattgccggtgtagtggctatcgtaggcgctatctcggtgtacatcgccatgaacaacgaggaacaggacgtgaagaaaaagattatgatgatcgttggcgcatgtattttcttaatcgctgccgcacaagcacttccgatgttcttcggtatcggcgcataaccctcccgcacgatgaaaggcaaggacgaacgctatcccgactacccgctgttcaagggcctgcaacggcctttggagttcatgggtattcagggacgctacatctactgggcggcgggcgttgccggcggagccatcgtcggatttatcatcgcctactgcctcgtgggtttcgtggccggactggtcgtgctggttgcggtcgtctcgacgggtattgcgcttatcatgctcaaacagcggaaagggctgcataccaagaaagacggtcgcggagtgtatatctacgcccactcgaagaaactgtgagaagaaaagaaaaaccatcacgggcaacgtgtggtcttgttgaatgttgaacgcgggccggccgcctgaaatccgggtggaccggccttttttattgtattttgaaatgaccttgtacatcattctactttttatcgccttgtgtgccggcatggccctgtcggtctatgcgttcggtaccggaggcaagcgtaagcgtatctttcaggacatctatttttctgtggaagatacgaacggcgtgggcgtgctgtacaccaagacgggcgaatattcagccatcctgaaaatagagaatcccgtgcagaaatactgtgcgaacatcgacagctactacgagttcacgcaccttttcaccgccctcgcgcagacgctcggcgaaggatatgccctgcacaaacaggacatcttcatccggaaacagttcgagaacgagacgggggacaaacacgagttcctctcatcggcctacttccgttacttcaaggggcgtaactatacggacagcgtgtgttacctgaccatcacgcaggaggcgaagaagagccgcctgttctcgttcgacaacaagaagtggcgcgactttctggtcaagatacgcaaagtgcatgaccagctgcacgatgccggggtacaggccaggttcctgaacaaagccgaagcgagcgaatacgtggaccgctatttcgccatgaacttcaaggagcggatcgtgtcgatgaccaacttcaaggcggacgacgaaacggtctcgatgggcgacaaacgctgcaaggtatatagccttgtcgatgtggactgtgccgcactgccctcactgatacggccttacaccaatatagaggtcaataacacggatatgcccgtggacctgctggctgccatcgacaacattccgaatgcggagacggtcgtctataaccagattgtcttcctgcccaaccagaaaagggaactggccctgctggacaaaaagaagaaccggcacgccagtattcccaatccgagcaaccagatggccgtggaggacatcaagcgggtgcaggaggtcatcgcgcgggaaagcaagcagctcgtgtacacccatttcaacctgatcgtcgccgtaccggccgatacggacctgcaaaaatgcacgaaccacttggagaatgctttcggacgtatgggtatccatatttccaaaagggcgtacaaccaactggaactgttcgtgaactcgtttccgggtaactgttacggcatgaacgaggactatgaccgcttcctgacgctgggtgacgcggcgatgtgtctgatgtataaggagcacatacagcacagcgaggagacaccgctgaaaatctactacacagaccgccaaggcgtgccggtggctatcgacatcacgggaaaggaggggaaaaacaagctgacggacaactcgaactttttctgtctcggtccttcgggcagcggcaagagcttccacatgaactctgtcgtgcgccagttgtacgagcaaggaacggacgtggtgatggtcgatacgggtaacagctacgagggactttgcgaatacctcggcggcaagtacatttcctataccgaggaaagaccgattacgatgaacccattccgcatcaatcgggcggaaatgaatgtggagaagacgggcttcctgaaaaacctcgtgctgctcatctggaaaggctcgcagggtacggtcacaaagacagaggaccgcctgatagaacaggtcatcacggagtattacgacacttatttcaatgggttcgacggcttcacacccctgcaacgggaggatttgcgtaaggggctgctcatcgacgaccgtaaccatgccgagaagcaggacgaggacgaaggagagcggaccgggcgtatcgagcgcatgatcgacgagatggaacgccgccgtaaggagttgaaagtggaagagctgtcgttcaactcgttctatgaattttccgtgcagcgcatccccgacatctgtgccgaaaaccatatttcgggcatcgacatatcgacgtaccgttacatgatgaaggacttctatcggggcggcaatcatgaaaagacgctgaacgagaacatggacagttcattgttcgatgagacgttcatcgtcttcgaaattgacagtataaaggatgatcctctcctgttccctcttgtcacactgattatcatggatgtattcttacagaagatgcgtatcaagaagaaccgcaaagtcctggtcatagaggaagcgtggaaggccattgccagcccgctcatggccgaatacatcaagtttatgtacaagacggcccgtaagttctgggcctcggtcggcgtggtgacgcaggagatacaggacatcatcggcagccctatcgtcaaggaagccatcatcaacaactccgacgtggtgatgctgcttgaccagagcaagttccgcgagcggttcgatgaaatcaaggctattctcggacttaccgacgtggactgcaaaaagatattcaccatcaaccggctggaaaacaaggaagggcgcagcttcttccgagaggtgttcatccgccgggggacgaccagcggcgtgtacggcgtggaagaaccaagagagtgttacatgacctacaccaccgagcgggcggagaaagaagccctgaaactctacaagcgggaattgcggtgcagccatcaggaagctatcgaggcgtactgtcgggattggaacgccagcggtatcggaaaatccctgccgttcgcccaaaaggtcaacgaggccgggcggatattgaaccttcatgtaaaacaataacaatcaaatcatcaattacagaaaatggaaaagatagacatcagccaaagcgtgaagacacttgagttcgggagcaaatatgaagcccgtatccaacggatattccgtgagttcgacatcaaaaccatccgggatttgtgccaatggcccggaaaggacttggtaagggtacgcgacatgggaagaaaaagcatcgaggaaatagaggatgttctggaaaggtacaatctccggttgggaatgcccggtaaggaactggacgaatacgccggtatcggaaattccgtgcaggacgaggaagaagaggcgaagtgggaacaacgcaggtacgagatagccaaggaggtattcatacaccaccgtctggtggcaaattccgccgtatatgaggccgacgaactgatacgtgcactaagaggcatgacgcgccgttgacgggggctgtttttaaccggggaggaatccatgatgaaacggctgtcacttatccttatgctcctgtcgctcgttgtcgtacagcacatccacgcgcagtattacagcgtgaactacgatgcgcgtaccgtggcggcaatggctaccgctttcggtacggaagccgtggcggaaagctattaccgggagcaggtcgatgacatactcaagcactacaatgcggcggaagtggccacggcggggatttttgcctccaagttcttggagcataaagccttttccgacctcggtatctggaacagcagtacggagaactactactaccgccgcatttaccgcatggtctcggagaagatcatacccaagatatgggtggtggcgaaactgatgctccgctcaccgcaaacggctatctactggggcagctacctgatgaaaatctgcgacgaaacgaaaagcctgtgtatgcagttcgagagtgtagtgacgaacagcacgttgggcttttcggacatcgtgtttctggaaatcaaccggaacatcgcccctctgttgaaactctcggagataggcgacatcgactggcagcacatgctggacgacatcgccagcgtgccgggcaatttcaccaaggagaacctgcaacacgacatcgacaacctctacaacatgggtgtcggtctcgcctcggcaggtatcgggaacattggtgacgccctgttgcaaaccagttcgttccatgagctgatgggcggcagggtcagcaaggtcatcgacctgtatgaccattacggtgcgctcttcgagcaggcggagcatgacctcggcggcctgctgattgacatggtgggcggtgaggacaacgtggcgggactgttcgatttcagcaactacgaccttacctcctggatgacggactatctggacgagacggcgggaaactactacacgcaacggtggtatatcgcccggcgtgagcaagggagtatcgccttgtgcgactactacccgccgacggacgataacagcatactgaacggcggcgaatggacgcgtttcgagacaaccgatcccgacttttatcccaatgcctcgcaacgggagcaggcgctcgccaattcggaacggtacgccggttggtcgagaagccgggtacagcagctcaacaaccagaatgacggctatacctatagtatcaactactggcagaacggctatatcatcagccggggcggcaaacagacgaagaaggcatacgcctacgaaatccatgtgaagaaaagctggaaccgggaagaggtcgtctatgaagaggtgttcgattcctactcgatggacctgaacacgttcaaagccgggcttaacgcccgactctcggagttcaacgacaacgaggaaggttatacctattatatagcttctgacgcgcggaactattatcaggcgacggacgccgcgaaattgcaaggctgcgagagcgtgaccatcagtgtaacctgttcggacggggctacgctcggtcagggcacgacgcagtacaagtgccgaacgtgcggcaaatccctgaacgcccattcaaaggagtgtgccatgcagaccacggttacggagaacgaactggacttgtccgagctggacgccatgctgcaggaggcagagaatcaggtagccgccatccagtcgcaaatcaacgcgttggagagcgagaatgccgacctgctgaaaaaaatcgccgaggcaagcgtggaagatgcggcggtgtaccggcagcagtacaacgcgaacaagacacagatagaccgcctgaaaagcgagctgtccgaatggcagaagaaacaacgggaatacaccgacgcgaaaaccgaggcgtcgggcgataacgatgtggcaacagacgactattaccgcataccggccatcatgcaggactgcaagacggcttacagcctgtcgtggcaggacggcggggcgtggaacggctacacctatgtccgtaaggcgaccatgccgaacatcaacggggtcatcacgttcaaggcgacggtctcgatagcccgcaaaccgaaatatttcctcggtatcaagatacaccgtgccatcgtgcagatcagttgggaactgaccacggaatacaccgacacgtatgtggccgacgtgctgacgctcgaccctaacctgtcggacgcggagaaaacgaaactggtgaacgaccgtattgcggagattgcacgagagcatccttcgtgcaagatcacgacggaatatgcccgtaccccaccattggaagagactccgaccggggaggtgtaccatctgctgtggtcaagcgaccggctcgaaatcgcacgggaagtggattcccggattacgatgatatatgccgacctcgtgtcactggagaagatgatgcactacaaacggagcatcatcgacgtgctgaaggacgtgctgcccgaattggatatggacgagggacgcaggctgacgctcgtggaggaatgccacgaacgctgggtggagaatgcgcggaacctgcggagcggaaacggcaggaacggcaaaggcagcggaaaggaggtgcggccatgaaacgtgccctgctgatggcagtcgtgctgctggctctcctgcccggcattgccaaggcgcaatggacgttcgacatcgtgtcggtagaagcctacatcaacgaccacaagaagcaacgcagcctgctgctggcccgcagtacgctggaatacagcaacaagctgctgcacgagtacagccgcaaagaggtcggcgagtacaaggaactgaatgtggacttggaccgctacacccgtgccttcgacgtcatcgacgtgatgtaccagtccttgcggacggtgctgaacgtgaaaagcacctatacggcggtcagcgaccgtatcggcgattacaagagactgctggaggacttcaacgatagaatcgtgaaacgggggcgcatcgaccccggcgatgccgtgatactggccatcaacgaaaaggcaatacgggacatcgccgatgacgggaaacagctttacaaatcggtcagtgacctcgtgctgtatgccacaggggcggcagaatgttcgacctccgacctgctgatggtgctggaagcggtgaacacgtcgctggacgacatcgagcggcacctgaaccgggcgtatatcgagacgtggcggtacatacaggtgcgcatcggttactggaaagcgaagatttaccgtcccaaggtcaaggagattatcgacggggctttcggacgatggcgcaaagcgggacggctggattattaacgaacgataaaagggaaagaaggcaaactatctacaggttagagtttgacttccatgccatcgacatcgggaaataaaaacagagaaagaatttttagtacaaacaagcctattgggattataccaagggataaaaagacattcagattgatgcaatggaaaagattgtttttgcaaaagacattacgttatataaggccgattgtcttgaagtgatgccttttcttccggaatcaagcattgatttggttttatgcgatcccccttttggaattacagcttcacagtgggataaaataataccattcccggaaatgtggaaagagatcaggagagtcaggaaagaaaatgcacctacggtcttatttggcagcgaaccgttcagcagctttctacgctgcggcaatttagatgaatttaaatatgactgggtttgggaaaagtcaaaagcaagcaattttcttctcgctaaaaaacaacctctaaaagcacatgagctaataagtgtctttggcaaaggcagaaccccttattatccaatcatggaggaaggcgagccttacgggaaccgcacgaagagaggaagcaattggacagggataaacaatgtacccaatcctacattcaggcatgaaaacaaagggacaagatatccacgaagtgtgatatacttcaaaacagcggaatcggaaggcaaaacgattcatgtcaaccaaaagccgattgcattattggagtatctgataaaaacatacacaaaggaaggagatactgtccttgattttgcttcggggagcatgagcaccgcaattgcctgtatctatacgaatagaaaatgtatttgcattgaaaaagacgagacatatttctcgcaaggagagaaacgagtcaggaatgaataccaatatttatgacagtaaaggaagctcaaaaaaagtatgactatacgatataaataactgtaaaataatgaataaccggaaattaatatgaacagaactctcttactcatggcggttgcagcagttgcaacgagcggtgtcaaggcgcagtcggttacttacaaccatgactcgccgaaacagaaccagattacggttatggaaaccggtacgggcgctctgtcgcccgaactttattacacgctgctgcacaacaagtacaagaagtcggcggcaagcaagaacaaactgtcgttccgcacgctggcgggtgtgaacctgtacaaccagacagacgaggcggaagccatcgactcggcactggtcaagcgggccgaaatcgaggcactgaatgtagccgaccggcagattgacctcgcgtggctggccgagggcgataagataaacgctcaaatggaacggcttcagcgcaacatcgaccgcatcccccttgccgggggcacaacggacgacagggagcggtggacggaatactaccacgtctaccagtgcgccattgacgctacgaaggacgcctacatgcccaacgcacaacggaagaaagagtacctgcgaatctacgaggacgtggtacggcagaacgagattctggtcggctaccttgcccgaagacagaacgccacggttgcgaacgggctgctgaatgcaaccgccgaccggagactggacaagggcggtatcgtccgcgaggcgatgggccggtggaacgaatcgcgttccgccgtgcgaggggcgcaatcgggcggcgaaactgatacgggagacggagacgagacggtaaacagaaagaactaaaaacacacaacgtatggcagacggaaatattctttcggatttcggtatcgacctcttggaagaggaaatcgacgacgtgatttttcagaccaacgagtttctgaccgatgcgacctttaccggctcgcaaggtcccttctggtggattcttcaaatgtgcatggcactggccgccctattcgccatcatcatggcggcaggcatggcgtacaaaatgatggtcaagcacgagcctttggacgtgatgaagctcttcagaccgctggccgtgtcgcttatcctctgctggtggtatcctccggcagacacgggcatggcaaacagcgggagcaactggtgctttttagatttcctctcctatatcccgaactgcgtcggttcgtacacacatgacctgtacgaggccgaagcctcgcaaatctcggacaagttcgaggaagtgcaggagttgatttacgtgcgcgacacgatgtacactgccctgcaggcacaggccgatgtcgcccatacgggtacgtcggacccaaaccttatcgaggcaacgatggaacagacaggtgtggacgaggtaacgaacatggagaaggatgcggcgaagctgtggttcacctcgctgacttcgggggtaatcgtggggattgacaaaatcatcatgctgatagcccttgtagtattcagaatcggttggtgggcgacaagatatataattgtgcaataatctgataatatacaatttatgacaacattgtaagagtcaatttgtaatttagtaccattttagtatcactattttgtttctgtgataaagaatctgaaatcaggctcatattccattaaatatatcatctaattgaaaatgacactttcggttgtggaaattatgccatgaggagaaaatgtaattatgaattttacattttcttctcatgcaaatttataggttttctccaattttatccaaagaaaaatcatcactctttctacagataatacgaagcgcattgggtgattttatcttatatggggtcaatttatatgaagaaattattatgtctaccaattgttgttgcgaaagcatttctccctcaaaacgtgtcaatcctgccccaagaataggaattgccacatcagtttgtgcgtaatatttatctatttctttccaaaaagtatttaaacaagacaaataatcttctctgctcataacagcacgaccatttttatctaactttccaaaagccataagtaagaactttccataaggtagtaaagttccagattcatagcacatttttccattatattccgagcgtttccttgctggtttcaaacaattgttggataacaaagatgatatgtctactgtatgcttctgcaaaaactgtccgcataatgaggttggcttaatttgatggatagcatcacctatttctgtggtgtaacattcatcgaaattgattaccttcttgcattgtgtttgttcaaaaacatccccatactctacatttattttgtaattcgaaccactaattgtgatttttttacgacaacgtttccatacaaatacgattcctcctgttaggatgccaaccaacaataagaatagaatccggttaattgcatcgctccaatactcagaaagaaaagcccaagaataaacatctgagaaaaatttttctggaataaaagagaaacagccagtagttatggcaaatgtatatgaacaaatttgccgccaatctttattcatatccgagttgttcctttataaattgatagtttccaatcttgtttccacaactatcatatatccagaacggcactgcaacatctttatatccgtacatataacctggcaaccaattctctttcttatatactgaattatagaccactataatctttttgcatcgttttttcgcctgttcaaattcatggcgaagatatgaacatgaattaatacaaccaaaatcgccatttggatccgaaggggatgtgcttatatgtttgcagctttttaagccgctggaattatgcttgtatggagcacaactgcattgaaaccactccttgtacattctttcgcatccagatccagcagtacgacttgctgttttgtcacctatgacgaaaataactgctgaagaagcattaatttggctgttaaattcagatttcaaatcacattttcgacaatcggaattttcagatacactaccagacacaacctttgccatatcaacaaaatcaactttgtgataattgtcagtgccccatttattaagttcctcaactacatttctatcaccgctaccctcatcataatctgcactaatataaactcttttattcatttttgttcgttttaaattactgtttcacataaggcaaacaccataccaagagcgtaatttagccaagctgctgccaaaatgtcacatctgtagtcaatgttcaatctgtttaaactttagcttccgtgtgcttatatactttttcttggattacgcaagaaaatccaagaaaaagcattacctttgtactctaaacgcaactgcgctaatgacctgaagaataaataatagaacaatatccgaaactccttcgctgtcttataggctttggtcagcctcgcagggatagcgtaggagttttgttttaatatagattatggcgaaaaaggcgaaagcaaaggaagcaacaaagaaaaccattgagcaaacactgtgggattcagcaaacgagctgcgtggcaatcttgatgcagccgagtacaaaagtgttgtactcggtctggtatttctaaaatatatcaatgactgcttcaaagtcaagcacgatgaacttgtggcagagggcgatggttttgaagaagatccggatgaatatatcggtgacaacattttcttcgttcctgctgacgcccgttgggataaagtggtgaaagcctcactgactgctgaaattggagttgtcgtggatgcggcaatggaagcgttggagaaagagaacaagcaactcaaaggtattctccctaaaaactatgctcgccctgaacttgacaaacgccgtcttggtaatgtgattgatatttttgagaacaacctacatttcacaggaacggaagctcgtgatgtactcggacgtgtatatgaatatttccttggagaatttgctcgcgaagaaggcaagaaaggtggtgagttctacacgccctcttgcgtggttcgtaccatagtcgaagttatccagccttacaagggtaaaatctttgaccctgcttgtggttcgggcggtatgtttgtgcagagtagtaagtttattgaacgccaccaaggtaatatcaacaaaatatccgtttacgggcaggaactgaacagcaacacatggagattggcacagatgaaccttgccatttgcggcattgaagccaacttcggtgacagcttcggtgattctttccacgatgacaaacacccttttctcaaagcggactttgtaatggcaaatcctccgtttaacatttccaaatggggcggcgaccaactccgtgatgacccacgttggcaatacggcataccacccgaaggcaacgccaacttcgcatggatgcagcacatgctctatcacttggcagatgacgggcatatcgggcttgttcttgctaatggttcgctttcctcacagcaaggcacagagggggatattcgtaaaaatatagtaaatgccgacctcgtggaaggtatcattgccatgccttcgcagttgttctacaacgtgcagataccttgttgtctttggtttttgacgaaacagaaggcacaaccgggcaagactcttttcattgatgctcgcaatatgggctatatgaaagaccgcacacatcgcgaactttcctgtggtgaggaagccgaagaccacggcaacgatattgcacgcattgcagaaacttttgagaagttccgtgccggagcgcttgaaacagaaaaaggattctctgctattgcctctattgaggatatagcaaaacaagacttcatccttacccccggacgctacgtaggcatcgcagaggtggaggatgatggtgaaccattccaagaaaagatggaacgcctcacttccgagctttcggacttgttcgcccaatcacatactcttgaagatgaaatccgcaaacagttggcaagtataggttttaccatcaagtaaaaaacttctactcttcgttagattcactctaaataacgaagaatatgaaagaaaaattaatccaagaaatcagcaccgcaatggcagaagtgttaagttttgaacaagtagctcaccttaatagtgtattgctccagattgtgagcggctacactattaccgaagacggcgagaccctgcacgaaaacgcagcgtctaacgaccgtttgcttgacatcttcttgtctgcaaagcaagtggagggctgcaccactcctacaatcaaatactacggttctactatccggcagttgttcaagaagatgcctaaaaaggtaaccgattacaccaccgaggacatcagagcctaccttgccgtatttcaacggaaaaataaatcgagcaaagttacaattgataatatccgccggatattttcttcgtttttcgcttggcttgaagaagaagactacatcgtgaaaagtcccgtccgtaggattcacaaggtaaagaccggaacgcaagtcaaggaagtgttgagtgatgaaaacattgagcagcttcgtgacaactgcactcaaatccgtgaccttgccattattgatttgcttgcatctactggtatgcgtgtgggcgaattagtgaaactcaaccgtgaagacattaacttcaccgagcgagaatgtattgttttcggtaagggtaacaaggaacgtatcgtttacttcaatgcccgtgcaaagattcacttgcagcaatacttagcttctcgcaaagaccgcaacaaggctctttttgtctcattggcaaaacctcataaacgcttggaaatatcgggtgtggaaacccggttgcgcaaaatcggtcgcatagcaaagattgtgcgtgttcatcctcataagttccgccgcacgttggctactatggctatcgacaaaggtatgcctgtggaacaagtgcaacggttgctcggtcatgtcaagattgacaccaccatgcactatgctatggtgaatcaaaacaatgttaaactctctcaccgcaaattcatcaattagtatgtgggtttgttcgtcatatggcagaagcatatatttcccaaaaatcaagcgcggaaatgataatttagagcagcaggcgcaagcgttgttcaagtcgtggttcgtggataattccaatcctaatttggaagaaacgtcattgtcagaagtggcttctttcgttggtggatattcatatacaggcgaagaattgaccgattgctcaaatatagccatggcaaccataaaaaactttgggcgaaatggtggctttaaagctgatggttttaagggaattaatccgtctgcaaaacttaaagaatgccattatgctaatttattcgatattttagttgcgcataccgaccttacccaaaatgcagatgtgattggtaatgctgaattattacttacttgtggtaaatatgatagcattatcttctcaatggacttggtaaaagtcctacccaaagaaacattcccttataggtttttacttgcagcaatgctaagaaataagctatttaaggggcatagccttgggtatgtaaacggaacgaccgtacttcatcttagcaagaaagcattgcctgattttgagataagaaaaccgtccgattctgaatcaaaaatgatggatgaggtacttgcctcttattataagcggatggcagagttattacaagaaaatgacaggcttattagccttcgcgatacacttcttccgaaactaatgtcgggcgaactgaaaatcaacgatttaaacagctaaaagcattgaatgatgaatgactttgaagaatatataagacaaggtgagcctcagaaaagagaaaaaggctatgcttggcaaacagccatcggattgcaggcggtggacgatttgaagccttcagagtatctgatacaaacggcacgccagcatattgagggcgatataactattgaagaagccaaacaacttatagatagttattatcaatcaaaaaccattagggctgacattgaagacagaacggaagaagccgataaagtttcagctcgtattgccgaaatactatcagagaaaacttttacattttcgcctgttgagtatatcaccattcatcgccgcctattccaaggcatctataaatttgcaggaaaggtcagagattataatatcaccaaaaaggaatgggtgctgaaaggcgaaaccgtactttatgccagtgctgacagcatacgagaaacgctcgattacgattttatgcaggaaaagaattttagctacaaggatttgaacatcaacgatgctatcacacacatcgccaagtttatttccggggtttggcagattcacgctttcggagaggggaatacccgtacaacggctgtgtttacaatcaaatatctgcgcacgtttggcttcgacatcagtaatgaggcgtttgccaatcattcttggtatttccgcaacgctttggttcgagcaaattataacaacttaagcaaaggaatttatgctactaccgaatatattgaagcgttctttagaaacctcattctttccgagcataacgaactgaagaaccgagcaatgcttgtgcaagaactttctgcccaagacactcaaagtgcaaacacgacaaaagaaacctctccaaagtgcaatatttgcactttgagttgcactttagaagaaattgccgtgctgaacttcttgcgagaacagcctaaagctacgcaaaaagaaatcgctgcgcatataggcaaatctgagagaacagttaagaccattaccgtaaatttgaccgaaaaaggcatcattgagcgtaaaaacggcaaaaggaacggcttttgggaagtaaaaacgaacgatttaaacagctaaattctcatttatggaacaatggaaagaaacatataatactggatggagtgattggaaatcttttccagacccgagaaaaggagaatacataaatgccccattgggaagcggagtgtatcagcttaggaacaagaaaactaatagatatgttttatttggaaccagtaaacatttggcatataggatgacatcgttattacctaagccacacggtgctggaacaagaaataatgaagacaaacaaaattatgttctaagtaacatagaagatatagagtatcgaacaatctcgtttataaataatgacgatgcaaaacaatttgaaatctatattaagtttacagaacaatatctttttaacacatagttagatatatttttatggaacagtggagacaggatagacttatagatattttagataccttgattgattatcgtggtaagacacccaataaagttgattgtggtatccctttaattacagctaaaatagtcaaaaatggaagaatagatactcctactgaatttcttccgacagaagattataatggttggatggttagagggtttccgcaggtgggagacgttgttcttacgacagaagctccattaggcgaagtcgcacaattaacggatgagaaaatagctttagcacaaagaatagtctgcctacgaggtaaagaaggagttttggataatacatatctaaaatatttctttttgtcaaatatcggacaaaataggctgaaagcgagagaaactggtacaacagtaactggtatcaagcagtcagaactgaaagaaatcctaatcgactatcctaagattgatactcaaaaagccatagcctccgttctttcctctctcgactccaaaatcgagctgaaccgccggataaatgataatttagagcagcaggtacaggcgttgttcaaggcgtggttcgtggattttgagccgttcaaggatggtgaatttgtggattctgagcttggaatgataccgaaagcttggaaaataaaaccattggaataccttgttgaaaaggttaagtctggcgattggggtaaagatgagccaacaggaaactacacaaagaaaacattttgtatgcgaggcgcagatttcccagacataaaagaaggtaataaaggtaaaatgccaatccgttacattttagaaaagaattttaacgataaatccctttgcgatggaaatgttgttgtggaaatttcaggaggctcgcccacacaatcgacaggtcgtattgtgttagttgatagggcttttgttgcagactgtggcaatgccttgatatgtacaaacttttgtaagtcattggagataaaagaggattattcaatgttcttttatcttttgtggcaatacctttatgatttaagggtaatgtttatttatgagaatggttcaaatggactaaagaatcttaacgtcaatagtttgattgagagagaatcatttgttattcctacgaaagaagttgtatcaaaatttaattcagttgtatctgatcttctttcaacgaaacaagcaaatggtattgaggtctcacgtttggcttctcttcgagacacacttcttccgaagctaatgtcaggcgaattaaaaaatagtgaaatagaaacagagaaataattatggataaatcaatcggcatattggatagagattatactttatgggtcaaagaacttgtaaagcgttatcgtggtagccaaatcaaagctgcaataaaagtgaacaaagaattgcttcgctattattgggaactcggtaaagacattgaagagcaacaagcagacaacaaatacggcagcaagttctacgctacactaagccgtgacttgcgccatgaaatgcctgatgtcgaaggactttctgagacatcaatccgctatgcgaaacgattttatgtcctttatagtcaatatatagcaattcttccacaggttgtggaagaatctgaaaatgtaaatcttccacaacttgtggaagatttatattctgatttgttctcaataccttgggggcatcaccgctacttaatagataaatgcagcaaagaacctgcaaaggctatatattatgtgagaaagaccatacaagaaggctggagtcgcgatgtgatgctcaattttttggattcaggcatgtatgagcgtgagggtaaggcattgacaaatttcacacgtacattgcctgatgaaacgagcgacctcgcacaagaactgaccaaagatccatacaactttgcctttacaggtataaaaggtcagtataatgagcagctactcaaagatgcgctacttggcaacatttcccaattcttattggaactgggtacaggtttcgcatacgtgggcaaagagtttcggcttcagatagggcaaaaagagaagttcatcgatttgcttttctacaatctgaaactgtcgtgttatgtggtgattgaagtaaaaatcggtgagtttgactttcaagaccttgggcagttgagcggttatgttgtggcttgtaaccatatccttaaaaaagagggaagagacaatcctacaattggtttgctcatctgccgacaaaaggattctcttcttgcgcaatatgctttggagggcagtaatctcccattgggaatatccgaatttgagcttgaaaagctctatccagagaaagttgaaggtacaatgccgtctattaaggaaatagaggctaaattagatggtcaaacaaacagctaaattctcatttatggaacaatggaaacaatataaaataggtgacctttgctcgatttcatcaagcaaaaggatttttgcgaaagaatatcaaacttcaggaattcctttttatagaggcaaagaggttattgaaaagcagaaaggagaaaatgtttctactgagctttatatttcagaagcaagatataatgaaatcaaaaacaaattcggagttccagaagaaggggatatgctcttaacgtctgttggaacattaggcgttccgtatgtcgttaaagatgaaaccttttattttaaggatggaaacctaacatggtttggtaactttaagggactcaatagtaaattcttatactattggtttttgtctcctatggcaaaaaacgcaatagacgcaaaggctattggttcaactcaaaaagcattaacgatagatgctctcagtaaatttgaaattgacattcctaacgttgatgtacaaaataggatagtttctattctttcttccctcgacaataaaatcgagctgaaccgccgtataaatgataatttaatcccaacctattatgcttaatacattccattttacagaagattcatacgagcaatcgataatctctttgttcaaggagatgggctatgaatatcattatggtcctgaccttgaagccgacaccgggcgagagcttaccgatgctaccataccgggagtattgcgcaaagcaatgttggctatcaacggagctgacaaaaccgctgccgtagatgaagcaatccgccaaatacgcgagttgttcagtcagccgttagtaagcgcaaatgttacttttaccgactggctgcaaaacgggttggacgttacgttcaagaccacccaaggcacgcttcgcagcgaccatatcaagataatggacaccgccaacattgacaacaaccgatttatggtagtgaaccagtggacggtagttaatggaaaatccaccaaacgagctgacatcgtggtattccttaacggtctgcccgtctctgttatcgagctgaaatcgccctcgcgcgaaatcaccaactcagaggaagcccaccagcagttgcagaactatatgcgcatcgttccgcaactctttaccgcttgtcaaatgcttgtgataagcgatatggcagacacccgtgtaggcactattaccgctccactcgaccgatatatggagtggaaaaccacggacggaagttatgagagtacggcatttgccgactttgaaacttttttcaacggcatcttcgccaagcatcggtttatagatattatcgccgactttacccttactatgggtgtggataaaaaggcacgcatactggctggctaccaccaatattttgccgtaaagaaagccctcgactgcactaagaaagccctgcaacgcaatgacggcaaaatcggtgtgttctggcacacgcaaggttcgggcaaaagcctttcgatggtgttctatgctcaccaactcctgaagaatttgttgagtgcaaccctgcttgtgctgaccgaccgccttgacctgaatgaccagctgcacagtacctttgccgcttgcagcgactacctgcgccaaaagcccgtcaaggctaccgatggcgaacacctttacgaactacttgaaaagcgcaagagccacggcatcatctttgccaatatccaaaagttcaaagaccgcgaacaacttatcaccaaccgctccgatgtgattgtgattagcgatgaagcccaccgcacacaatcaaacaccaaaactaaggttgacacggaaacgggtgagctaaaactcggctttgcggctatcgtgcgtaaacttctgcccaatgcggcgttcatcggttttacaggtacgcctatcgaacaagacgacaacgacacgagggaggttttcggcaactacatcgacatctatgacatgacccaagctgttgaagacggtgcaaccgtgcccgtctattacgagagccgtctggtgaaattggatttggacgaaaatacactccgtttgcttgatgacgagtacgacaaactggcggaagaaggagcggaagaacaagacatcaaacgctccaaagatgaaaacgcacggcttcatgccctgctgtcagctccgcagactatcgacacgctttgccgggacatcatcgaccactacgaaaacaaccgcgccgacctgcttacaggtaaggctatgattgtggcgatagaccgtgccacgggcatagacatctacaaaaagctggtagagcttcgcccccagtggaaagacattatcggagtggtgatgacccaaggcaaccaagaccccgtggaatggaacgacatcatcgggtcgggcgcacgaaaagaggagttggctcgccaattcaaggacaacaactcaccgctcaaaatcgctattgtggtggatatgtggctcactggctttgatgtgccctcacttgccaccatgtacgtttacaaaccgatgaaggggcataacctcatgcaagccattgcacgagtaaaccgtgtattccccgaaaagagcggcggtttggtggtggattacatcggcattgccaaggctctgaaaaaagccatgcacgactataccgggcgcgacaagaaacgctttggcgacccgaatatcaagaccaccgcataccagcaatttgtcgctgccctcaatcgttgccgtgaatgtatggacggttacgattattccgccttttccgattgttccaacttgcaacgtgcgaacctcatcagaggcggtgtcaacgtgttgctcgacaaaaataaccttgtttcatcagaatctaccacacaaaccgacgaaaacggcaacatcattttagtggatgccgttccagccgaagcgcagaaagtcttcatggaagaaagcaaacgcttggcgcaagccgcttcgctttgtcgcagtttgctgactcctgctgaacgctacgaagaagcctattttgaagcggtgaggacattgctcttgcgtctgtcgggcaataagaagattacccgaaaaatcatagacgagcgcattacgcagttgctcaaagtggcaatcaaggcagacggtgtgatagaaatactcaacaccaaaggctctgagttttctcttttcgatgagaacttcttaaaagagatagccgaaatgaaagagaaaaacttcgccctcgaactactcaaacggctactcgaagaacatatcaagaagcacgctaaaaagagaatggtcgaagccgagaaattcagcgaaatgctcgatgctcgacttgccgaatacttgcgcggcttgatttccaacgaggaagtaattaaagaattgctgaaaatggcggaggaattgaggaccaatgcggaacaagcgtctgaattggggctgaacgaggaagaacaagcgttttacgatgccttgacgaaaccgcaagccgtccgtgacttctacgaaaacgaccaactggtagctatggccaaagaactgaccgaagccctgcgtagtagtaaaacaattgattggcgacagaaagaatcggctcgtgccaagatgcgttccatggtgaagcgactactcaaaaagtataaatacccacccgaagaacaggaagctgcacttgaaacagttattcgccaatgtgaactttatgcggattcggatgacgaaaatcagtaacgtttgattacaacattattgagggtgcatcattcactgtgatacaccctcaataacttttatctctgctcggattttttctccttttctttcactgtcttgacctgtcggttgaagacggccagcgtggaatccactccgactgtttcaaccagcttttcgtatgctccaacagttatcgctaatttcggatgtaattcattgagcataaccaaagtaacttggtacttgtcggcaaccgttttcagccgtctgttttcatcccagtattcatgccatcgtacccaactgacggtaaacagggtaaagaatacgagcgtacaaccgatgccagtccacgtataaggattcttgtgccagccatcagggactttgccccatagccgccttattgcgtgtagtatcttgcccggacaaatagccagccaaagtttcggtatacagccttggtttggctgcaacttttccgaagattgcttactattcttcaaaagttccgcctgcatttccaatatcttatgaagcaaatccttgatagtaggaataccgcgcttacgcatatcctcgttggtggtatctgtaaatacctccagacttgtaatcactccatcacacagtgatttcttggatttctctatggcttccttgctgccgaaaattccgcttatgttttcaggtgcattgccaccaaagaaacgtataacaggctccagctttacagccagtctttttagtgcctcgtccttgtctgagccattctttacatccagtttcttcttgatttcctcgatgtcttccgccaaagcccctataaggtcggctatattctgtttgtcgttcatcttcttctccttcttggtttaagtttgtctttttcgttatcgctctctccccagccgctttcgtttcctccacctccgccaccggatgaaaccttggcttgatgtggctgtacgcacagctccatgagtgcagcaatggttacttgtacgatgtcagaaccggattcaataggactatcaccgctgctgtctgcttccgttccgattggtgacggttgccctataagagtgtgcgctgcatgattgcctattgccatatcctgcagggttggctgcaaccgttcatcaacaccattgtccggtaaacgtggttgccatttcattccctcggcaatacggcttctgagctgtttgtccaacctataaaagcccatactccggtctatccgtgagccactgaatgagactccgtccttggtaaacgatacgccaacgatttcgcctttacttttgtcatatttgaaacgcaccccgataccttgtcctgccagtctgtcgcacaaatccgcccaactgttacaacggggtatagccgctttgacggtatcatatatctggtatttcaccttgtccttaccacgcagacggtcacgcttcactttttcctttcctttggcgaagtgcaggccgtactcccttgtgagggttttgcatacagccacgttccgcacggcatcgttacggtcgctgatggtgttcccgttattgtccaccctgttggccacgatgtgcaggtgctggtgttccttatcggtatgacggcacacgatatattgggtgtccgttatccccatacgccgcatatattcacgggcgatttcagccatcatgtcgtccgtaagcctgggtgtgtcctcgtgggcgaagtccagtgatatgtggtacacgggatttttcagcctgcgccccggcttgtcatccgcctgtccctgcatacttcttgcaatggcagcgttgtcgtcaagcctcacatccttgctgtcgatgagccgtgccttcttcgggttgtttacatagtttaccaatcgtgcgaaactcgcccgttttttcaaatcgcccatcatatcctcgtgatgattttgttgaactcgtccagcaaagccatgattttgcttttcgttccggggaagccttgctgatgtgccatcttcgccaactggttcaggttgttgcaccctccctccagcatccttatctgctgcctgtcctcctgtgtccttgccgccacaaccttgccgtacagcaacagttcgcgcaagaagtgtgacggcttcttcccggcatcggttatcctccgcatgaccgccttccattcggcaagcgtgagcctcgtggaaatggtcttagtccgcgccttgccctttaccgccttagggcggcctcccttgttcctgttttcctgatatgtcatatccgtttttattttatctgttaatgttctgttttttagggcttgtaatccgtgcttgccgtttcccgtgcggtgggttcgccgttggtggcgtggttttcgtggacgaaaacattaacttgccagccctaaaaaatatctctcctaaaacgctgtcgcgtatcgttcctgccgctttattcctgttcctgtttccagtcctgcgagtcgggtaaggcattgccatcctctaaaacaggtgtgccgtcggcatctgtagctgtgttttccgtaacgcactcggtagccgttattattgtaggggctgctgtttccgtttcccctgacggcttcccctttctcttcctcggtgaactgcggcgcaatgtctccagtctttgaccgttaaacaggaatatcctgaccccttcgtatgccttgaccgtctgatggtgtgttggattctcgatgagccgcccggcaatcatccacgacttcacgcacaccatatctataatggatgttacaggattggaatcaacacggataagcccgcgttccgaaaagtcctccaacagacgggaaaccgccttgcgcccgatgccccattccttggccagtaccagcatggagctgtccgcttgtccgggatggagggcatagctcaatccccgtttggtattcaccacttccgaaaccgtcatctttgacaggagggaaataaaaaaggtcaggttgcatactccgtccgtactgccgtgcaggaagtaccatgcttccaccgtcattgccatttccaatttgtagcacggcaaaacaagctgtttcaaattcttcataatcccgaatgatttttgttgtgcgttctacaaattatcctttggtatttttatccgcatccctgctggtggctttcaggctcttgatgcggcctatctgctcttttggaaacaggacgcgccgcccgatacgctgccccttgatgtgacccagtttctcgtgcctccagatggtcgctatgctcacgccccatttctcagccagttgccggatggtgtaatactccgatgtgtcctgtggtgcctgtacctgctggtattcctcaaacgcgcacctcacgcttgcaccgataagctgttgcagctcatcgcgcgataccagtaccatttctgtcttatctgccataatccgttgattttaagtttgtggaggcaaaggtacggcaggaatgtagcccgtgaatttgtgggattctgtgaaatgaaagggcataaaaagagccgtcaaacaactggtgcttaacggcttgtgcaaggcggtgggttgtggtgagttgtacccacctgtggattatgtcactattttatcatgggaagcaactccttgagcttcgctataaaggctttctccacgttatacttggcgaggctttcgggggtcagccccatagaacaggctgcggcagacctgtatcctttccagtccttgaaataggctttggagagcagggtggcgacacagcgcatcttgcctctcacgcagttgccgtatatcttggaatagtcgccacgcatgacggcatggatgaaatccctgtcggaaacggcattgccgtccagtacgggcttgcccttgtcgggcccgctctgcacggtaaaggtggcgaggaagcaatacagcctcataacaggaacttgggcggtcgtatggaacgctccgccgtgcaccgtatcggtggcggtaaaaccggatgatacatcttccttacaagggcctgttggcttggatgtgccttcatgcagcacatttcttttgacatatcccatcgtcaaagcgatatggaacatctttattccggctgactgcgctttgatattcgcattttggggcagcatggaaagacggacggcttctgcaaagtgttccgtaaagagctttgccaaatccttgtcgttggcattgacgatatagtctttgacagaccggattttttctctatccactttggcaagcatggcaaacatttctttccctttgttctcgtccgtagcctccgcacatttccgtatggcggcattgataatgtcgatgcaatcggtggcttcggagcgtgtcattggcttgggaacagaaccaatggcattggacgcttccgacagttcattttcggggaagaagtattgccctatggcttccatgctcaggtaggctacacctgtacggaaagccgccttgttcaagtcatcatattttgaacaaaggtcgtgaagccgcttcgtgtcgccgtgcagcccgacgaatttttgcgccagccccttgtcctcgtgttcggctatatattccctgatgccgtccaaaagaaaaggcagggtcttcagaccatatttgatgttcctgcaaatttccttgttgtccgtttcgccattatcgaaactcctgcctgcaagcgattccgcaagtttcaggctgtcactgatgatgtttgacagcttgaacaggtcgctgatggcatcgaatcttgatttttccataacaccctccttataattcaataatacctttgaagtcctttaacgctatgactgctttttcctccgcatccaatttcaggtagcggcgcagttgcgcttcgctgctgtgtcccgtgatggcttgaatggaaggcaatggaacacctgccttgtatgcgttggtggcaaagcttcttcgggctgtatgtgaaaggagcatgtcacagaacctccgtccacgtttgggattgagacgtttctcgtcaaagccgcaatcgtgagtccagccaagcaacagacctatggcttttatcaacttgttcatttcattgggatgaatcggtggcaacttgccgtcatatttgtcaagaatggctctcacccgtctgtcaaccgggatatagaccttcttttccgttttctgttgggttatgagtatgaactccgtgccaccgatttccgttatcatgtcctcgcatatccttgaatagtcggaaacacgctgcccggtcaaacaacccacaatgaacacatcccttacatgttccaatgtcctgatatgcgtgatgcggcatttggaaatctgcaactgcttttcatcttcgtctatatccagagacttccatttctctataaccgattctttggaggaaaggtcgagttcaagcatttcctgtatctgccccggtgtaaggtagatattatccacttcctcctttttcggcacgaaatccgaatgtcggaaatcatcgcatttggtcagcttgtcctcgtaggctgcctttgccaccgtgcgtacatctgtcatgtacgaattgatggcgttaggcatcagaccccgttctttccagtaaccgacaaggctgttgcgtgtttccatcgtcatgtcatccaatccgagtttgcgatggatttccttttggaaattgcggatttggcctaaaatcaagcgcagacctttcaggtaagctgccgaaactttaacggtacgtcctttcttggtgcgccgtcctgtttccatatcttctatataagaggtaaggaaatcctcgaatagcatcttgcctttgggcttgacctccacaatctgcatcatcccgttaagtacatcatgtttcacgctctcgatgatgttcttggcttccttggggttgaagtcgtctgcctcaaacgccgcctttactcttgcgaggacttgggcgaactgcccgtactttatcccgatgctcgacatcagggctgaagaggcgtattgcagggaacggtacttttcccattcaagctgcttgatggtgaatccggtcacgactttaatgttagccttgcctgtacgcacacgggcatagatagaaccgaagtcttctttccctgccttggatgatttgatgaagatgaaatccatacgcgatatatcctttggttacatggtgcaaaggtacaaaatatatcccgaaatatagtatcaaatagtaccaataatttctaaaaccgtggaatttcgtgagttttcaaaccaaatgaaaacacctgcaaataactgatatacaaagattatatataaaacaagatttcactgaatataaatggtggatagtgggcgaccatctattgtcagcaaattcttttgggaatgctcaccattttcggacctatccaatgggcgttctcgctcctacccaagtgggaaggcgcatgggcgaagtggctcacaaggtatctgacggtgcatttctatggtgcgatgctctacttcgtgggcttctacgtgctgctgctgttcgacatcgtactttgcatacaggtagagaacctaacggcgataacggcaagcgagcagacgatggcggcttacctgcaaaactccttcttctcggcgggctatctgatggcggcaagcatcgtggccctaaaatgcctgaacctcgtccccgaccttgcggcatggatgataccggagggtgacacggcgttctcaacccgaaacttcggcgagggcgtggcacagcaggccaaaatgacggcgacgggcgcaatgggtacggtaatgagataacaaagtaacgataaatattcaaacaaaatggtcatcaagaatttagagaacaaaatcaaactggtcggaattatctgcaccgcctttctcgtggggtgcgtcatcatcagcgtgtcgagtatctggacggcccgcatgatggttacggacgctcaaaagaaggtgtatgtgctggacagcaacgtgcctatactggtacgccgcacgacgatggaggaaacgcttgacgtggaagccaagagccatgtcgagatgttccaccactacttctttacccttgctcccgacgacaagtacatccgctacacgatggagaaagcgatgtacttagtggacgaaacgggcttggcacagtacaatacgctcaaggagaaaggtttctattccaacatcttgggaacgagtgccgtcttttcgattttctgcgacagtatcaccttcaacaaggagaagatggagttcacttactacgggcggcagcgtatcgaacggcgcagcaatatcctgatgcgcgaactggttacggcgggacagctcaagcgtgtaccccggacggagaacaacccgcacgggctgctcattgtgaactggcgcacgctgctgaacaaggacatcgagcaaaagacaaaaagcaactattaactctaccagtcctatgaatatcaaaggattcagacgtatgctgttcggcgagaagatgccggacaagaacgacccgaaatacaaggagcgctacgaacgcgacgtggatgccgggcgacgcttcgccaaagcgacacgtatcgacaaggcagtggccaaagtacagggtttcgccaacgcccaccggacgctgtttctcgtcatcgtatttggcttcgccatctgcgggctgacatggaatatttaccgcctgacggtggtgtaccgccatcatccgacccgccggacggccacggagatgcaggattccgtgctccgggaacggcataagatgctttccgtaccgcatgtacgaagattcgatacgaaggaaagtggtacggaaaggccggaatagaacggcaggcttatgaatatgccgtttgagagaactataagcaagtatgtgcaactcaattaaagggaaacaatgaacaatatcttcaagagaattaatttcaggcagccaaagtatatgcttccggctatcctctatattccccttctcggcacgtcgtacttctttttcgacctgttccataccgagaaggtcgaggtacaggataagacactccagacgaccgagttcctgaatcccgaattgccggacgcccaaatcaagggtggcgacggtatcggcagcaagtatgagaacatggccaaatcatggggcaagatacaagattattccgctgtggacaacatcgagcgggacgaaccggacaataaccaagaggaatatgaatcgcagtacaccgaagaggacatcgccctgcttgaccggcaggaaaaggaaaatgatctggcagcggaagcggccgatgccaagaggcgggagcaggaagctctcgcagaactggaaaaagcactcgccgaagcgaggttgagaggacaacgggaggtcatgccgtccgaaacggacagcaccgcaacggcggctccgccggacacgatgacgcaggccaagggaaccatcgacgaggaaagccgttcggtcaaagctcctgcggagacggacaaggcaagcgaggtggtgaagaaggtaaagacggcttcggactacttcaacacactggcgaaagacgctcgggaaccgaaactcatcaaggcgatcatcgacgagaacatcaaggccgtggacggctcgcgtgtgcggctgcgcctgctggacgacatcgaaatcaacgagagcgtggtcaggcgtggtacttacctgtatgccacagtcagcggtttctcttccggacgtgtaaaaggaagcatcaacagcatattggtggaggacgaactggtcaaggtcagcttgtcaatctacgatacggacgggctggaaggactttacgtacccatcagccagttccgcgagacaagcaaggatgtggcgagcagtgccatgtcgggcagcatgaacatgaataccagcggatacggtaacagcctcgcccaatggggtatgcaggcggtgaacaatgcctaccagaaaacgagtaacgccatcagcaaggctatcaagaaaaacaaggtgaagctgaaatacgggacgtttgtgtatctggtgaacggacgggaaaacaggaactaaaagggcagtgacaatggaatcagacatatcaaaacttcataagggaacggacggcttctattacgaggactacatcgctcccgataagcccgaaacattcgttgggaagctcgtaagtaccgaatggtggcacaaaggggtacgattcgccctgatatgcaactttcaggcagaagacgggcggaggattgccttattcgccttccagaagcataccggtttttacgggccgagagacggtgcggtcaatttcaaacatgtggagaagaataccctctgggagtgtgaaatccggaaaacccggacggaacgctgtacctggatgagcgcccgacaaattgtagaactgaaaacagacgcaatatgatagagacggatcgcatttaccttatggactgcatggagggcatgaaacagatagcggatagtagcgtggacgccataatcgccgacctgccttacggggtgttaaatcgcagcaatccgtcggtgaactgggaccgccagataccgttcgcagccttgtgggagcaataccggcggattaccaagccggacagccccattatcctgttcggacaggggcttttctccgcatggctcatgctgtcgcaaccccggctatggcggtacaacctcgtgtggcagaaagatcgggtgacgggacatctcaatgccaaacgtatgccgctccggcagcacgaggatattctggtattctataaaaaacagccggtctatcatccgcagatgacaccgtgtcctccggaacggagaaatcacgggaggcgtaaaacggagggatttaccaaccgttgttacggaacgatgaaactctcaccggtacgcatagccgatgacaaatatccgacctcggtcatcttcatgccgaaggaacacaagaaaggcgcgttctaccacccgacacaaaagcccgtggcgttgatggagtacctgatacggacctacaccgacgaaggcgatgttgtactggacaactgtatcgggtcaggcacaaccgccgtggccgctatccgcacgggacgacactacatcggatttgaaatcgaacaggtgtactgcgagattgccgaacggcggattcaggaggaactggaatgcaggaacaaagcacaagaggaaaaagagataagggaagaaaaacaaaatcaataaatcaatgacatggacaaaaaaggaatcgtaacggcatttcttctggcggcaggactgctgggaacgccgaatgtacaggcacaacgaacctacgaggagatggaacaacttacggtaaatgaacaggtaacgacggtcatcacggcctcggaaccggtacgcttcgtggacatctccaccgataaggttgtcggtgaccagccgatagataacatcgtccgcctgaaaccgaaagagggcggacacgaggacggcgaggtgctggccatagtgaccatcgtaacggaacgctaccgcacgcagtatgcactgctctacaccacacgggtgcgggaggcggtaactgacaaggaaatccagttgcaggaacgaaacgcctaccacaacccggcggtctcgatgtccaccgtggagatgacacgcttcgcccggcgtatctggaactcgcccgcgaagatccgcaacgtcgccaccaaggcacaccgcatgaccatgcggttgaacaacatctacaccgtgggagagtatttcttcatcgacttctcaatagagaaccggacgaacatacgtttcgacattgacgagatacgggtgaagctggcggacaagaaactgaccaaagcgactaatgtgcaagtcatcgaactggtcccggaactggtgctggagacgggcaagacgttccggcacggctaccggaatgtggtcgtggtcaggaaaatgacgttcccgaacgacaaggtactgaccatcgagatgacggagaaacaaatcagcgggcgtgctatcagcctgaatatcgactatgaggacgtgctgtcggccgattcgttcagcacggcattgctggaggaggaatgacaatgagaaagacgattatcctgacgattgcctgcatgtgcctcgccgtcggcgcgaatgcacaacggggcagcggccgcctttcgctcggagcggggctgctgtacaagaacgagctggacgtgacgctggcctacgaacacgagatgaactaccgccatgcgtgggagttctttgccaacggctacctgcaatgggcagagtgcgaatcctgcaagcatgtatgcccgaaatctttctggcagaattaccgtacctacggcttcggcgtggcttacaaaccctgcgtcacgaggggacgcaaccattacggaagcctccgtatcggggcttcgggcggaagcgatacgaggaagttccttgtcgggctgcatttcggctacgagcacaactatgtgttgcgggcgggctggacgctatactggcaagtcaagggagacgtgatgataaagggggccgatgtgctgcgtacaggagttgccctcggtattaaactacctataaaataagggaaagatgaaacagaacactatcagaaaaacgtgccaggtagtgccggttctcctcataaccggggcattggctgcctgcgacgcacatatagaagaacccgacaagacggtacgtcccggacatgtcctctgcgtggacggcaaggccgtgccgtacagcgagtatgaaaattccgggaaacaggcgattgccgtcgtcttccatacctattcggacggggaaacggaaggaaacggctatgccgtctatctgtgggacatgacgccgaaggcttttgccgacagcctcggtgtcgagcagggtacgtcggcggacattgctgcatacgacgggaatgagaacacgttcgccctgtacgatacggaagaaacggcctcgccgatggctgaagccgtttttgccttgtggaaatacggacagagcgcctatatcccctcggtggcacagatgcgtctgctgtattcggcacagaccgtcatcaatccgattatcgagaaatgcggcggcgacccgctgccgaccgaggccgacgagtgctggtattggacatcgacggaggtggaaggacagcagacagtcaaagcatggctctactcgacagccagcggaaccatgcaggaaacgcccaagacacaggcgcataaagtgcgtcccattataaccatcaacaactgaatttatgattatgaacggaattaaagattttcaagcaccacagtatgtggatatagtacatccggacaaaggattcttcgggtatctgttaagatgcaaatgtcctaaacaagaggacgtttccggtaatttcatattcctcgacgatggaatagactgctacaagaggtttccctccgtaaagaatcgcagggaagaaatccgggcagaatggaacggccgtatcagccgttaccatgatattttccaaggtcagctctgctatgtcaatgaagaattgattgaagatttcattgatttcatgacttatggctctgacaatgccgtccggattttccttgagaagtttacagcggaagtacgggcttctgcaatatatgacgggcttaaacctctatatgcagtttcccatgtctgccagctttccgctgataaccgtatgcaatggcctcacatccacgtcctctggggtattaaaaagaattgacatagcaatggaagagagcaaggaattacagggattttaccggatattccgtgcggtggtgtatgtctccgtactgatggagtttttcgagtatgccatcgacccggccatgctggaccactggggcggcatactctgcgacattcacggacgtatcaaacggtgggccatctataacgacggcaacctcgtgtacagcaaggtcgccacggtgctgctgatctgcattacctgtatcggcaccagagccaagaaacatttggaattcaacgcccggcggcaggtcttgtacccgctcgtgagcggctttgccctgttagtgctgtccgtatggctgttcggtcatccgatggagacgcggttctacacgctgccgctgaacattattctctatatggcggtatcgctcacgggggttatcctcgtgcatgtcgcactggataacatctccaagttcctcaaagagggactgatgaaggatcgtttcaatttcgagaatgaaagtttcgagcaatgcgaggaactgatagagactccgtacagcgtgaatatccccatgcgatattactacaagggcaagttccgtaaaggctggaccaatataaccaactgttttcgtggaacatgggtagtcggaacaccggggtcgggcaagacattcagtatcatcgagccgtttatccgacagcactcggccaaggggttcgcgatggtggtctatgactacaagttcccgacgctggccacgaaactgtactaccactacaagaaaaaccagaagctcggaaagttgccccaaggctgccaattcaatatgattaacttcgtggacgtggagtacagccgccgggtaaatccaattcaggcaaaatacatcaacaacctcgctgcggcgagcgaaacggcggaaacgctgctggaatccctgcaaaaaggcaagaaagagggaggcggcggcagcgaccagtttttccagacttcggctgtgaacttcctcgccgcctgcatctactttttcgtgaactatgaacgcgagccttacgatgccaaaggaaacaaattgtacgctgaaaaacggcaggacccggagacgaaattctggaaaccgacgggtgtggtacgcgccaaagagggcggggaaatcgttgaacctgcctactggttaggcaagtattcggatatgccgcatatcctgtcgttcctgaacgagagttaccagaccatcttcgaggtactggagaccgacaacgaggttgccccgctgctcggtccgttccagaccgctttgaaaaatcgcgcgatggaacagttggaaggtatgatcggtacattgcgcgtctatacctctcgtctggcgaccaaagagagttactggatattccaccgtgacggtgatgacttcgacctgaaagtgagcgacccgaagaatccgagctacctgctgatagcgaacgatccggaaatggaaagcattatcggagcgttgaacgcccttatcctgaaccgcctcgttacccgtgtgaatacgggacagggcaaaaatgtccccgtgagcattatcgtggacgagctgccgacgctgtacttccacaagatagaccgcctgatcggcacggcacgaagcaacaaggtgagcgtgacgctcggcttccaagaactgccgcagctcgaagcggattacgggaaagtgggtatgcagaaaatcatcacgacggtgggtaacgtggtgagcggttcggcccgtgccaaggaaacgctggaatggttgtcgagcgacatcttcggcaaggtggtgcaaatcaagaagggtgtcacgatagaccgggacaagacttccatcaatctgaacgaaaatatggacagcctcgtacccgcctcgaaaatctcggatatgccgacgggctggatctgcggccagacggcacgggacttcatccaaacaaaaaccggcataggcggctcgatgaacgtgcaggaagcggaggagttcaagacctcgaagttcttctgcaagacggatttcgacatgaaggaaatcaagaaggaggaagcggcgtatgtaccgctgccgaagttctacacgttcaagtcgagagaggaacgggaacgcattctttaccggaattttgtgaatgtgggaatggaggtgaaagaaatgataaaggacgtgcagaacaaacgaggggcgaaataagaaacctgtttccgatatgagggaaagtaaaaaaaatgcctgcaatgattccgcgattattgcaggcgttttggcgtttccggtatcttggaaaatcctgtggagttggttttggtattcaatactacacaaaaagtatattataccgaaacaaaatcaactttcaagacctttggaacggaaaataatgctacctttgcagttgaaaaagaaaacaaatcatatactgtggatatagaacaaaaaagcaaaataaaccaactgctgctttccgccactcccaaaggattgttattctccgaatggctgaaaaggaacggttattccgaccagttgataaaaagataccgggaatccggctggcttgagatgctgtcaaagggagtcatgtaccgaacgggagacagcctgtcggcatacgccgcattgtcctgctacaacaggcaattgggcaagacgttccgtgtcgcagctcattctgcattggaactgttcggcttcaaccactatgtgcctatggggaaaccgttgctgatggtggcacacggcaaacagcgtgttccggaatggatacgccacgatgttttcgacagggtgataaaaccgttttccaccgataccttttcagaaccgcagaccgcaacgattgtgaaatacgaagtggatctgctggtttctacacctgaacaggcattcttggaatgtctgttgcttgcaccgcaacaatattcctatatggacttgttctatatgatggaacaactgacaacgctgcgtcccgaaatgctacagcaactgctcgaaacgaccaagaaccttaaagtaaagcgtatgttcctttatatggcagaaaaagcgggacactattggttcgaggcacttgatacatccaaaataggactgggaacctccaaattgcaactgtcaaaaaacgggatttatatctccaaatacaaaataaccgtacctaaagaactgaacgaatatgaatgacatctataaaaaacaggtggcattgttgatacgcattatgccgtccgtgtaccgcatcaaagattttgctgtgcatggaggtacggctatcaacctgtttcataaaaacatgcctcgctattcagtcgatatagacctcacctatattcccgtaaaggaaagggccgagagtctggacgcaatcaacaaccatctgcgaactttgaaaagctacatagaaaaatccataccgggcataaaagtgatccacaagcatgatgtctggaaattacaatgtactttggacggtgcgaccgtcaaaatcgaagtgaacgggacaaagcggggtatcatcggagagacagaggacaggaaactgtgcgaacgggctgaaacggagttcaatatgacctgtaaagcacgtacagtttcttattcgcagctttacgggggcaaaattgcagcggcattaagccgccaacacccacgggacctgttcgattgcaagtatatggaaatggcgtcgtttcatgatgtcaagaacggcttcatgctttgcctgttggggagcgacaagcctgtcatcgaatctttgcagccgaacgccatcgaccagacggaagcactggaaaagcagtttgagggaatgtccgatactccattcacttattcggattatgaagaggcaaggcataacctcattcagcaggtaaacgacagcctgaccgaaacagaccgggaatttcttctgtcatttgaaaacggcgaacccgattgggaaaaatgctgtgccggagatttaagccgctatccgtccgtaaaatggaaattacagaacattgccaagctgaaaaagagcaatcctcaaaagcacaaggcgggattggaaaagctacagaccttcttatttccgaagaagggataagtttttatgggcatcatgccggacagattggtgttaacggaaaaacaatatttggaatcatgtacaatatgcgagaaataaaagaggaagactttgaagcggtggcaaaatttgaaattgaaatttctgaaatctcattcggagaaaaggctattactgacctcgagttccactgcaagaaattagccaaagcaaaagaccgacgcggaatgatcgtgatagaagacacggaatccggtaaaattgtgggctgggtatggatggagaaaaagcagaacagcctgaccggagaggtttatgccaacttcaagtccatttatgcggatgagtgcattcgaggaatgcaaattgtagacgacctgtttgaaaaaagcatagaatatgcgagagagtgcaaggcggcttatattgtcggcaaggttcatgccgggaacgtaccgatgcgctctttgtataaaaagcattgcttcgagccaacccatgtaacgatggaaaggaaattgttatgataacgtccggcatacaaagttttgctctctcgcatggcgaacaatacaaacacggaagaacaagcctgcgtgacttgtcaggtaaactgcctttcgtggcaaacgggtgtaccatgctgttatgcgttgaaggccgggctgtcgtaaccaccaatacacgaaaacggacattccgcaaaggtgatttgcttgtgttgttttcggacaccttatttgcaccgctgtgtgtttctccttcattcacggcagaatatatatccttgtcattggaactgacaggggagattttctacaaaatgacttcccccgcattttgggacggactgtatgaatatccggtctgccgactttcggaagcacaatactcattggcagacggagtgttcaagcagatgatatgggcgatggagaacggtgatgaagaaagccggaaaaacatcctgcaaaattgcatttacaatgtttttctggctttagatattgtgttcaagccgatgtttcccgacttgggcaagtgttatcaaaaggatcagtcaagggtgctgttcggcaagttcatgtcactgctggctaagaatttccatgtaaaaagagatgtacgatattatgcggacaggctttgcatcacgaccgattacctttataagataacctgcaaaatagaacagcggactccgaaggaaatcattgacctgtttgtcgtaacggaactcaaacgctatttggacaacacagaacagtccgtcaaagacctggcccgtctgttccatttcgaagacgcgtcgtacctttgccgctttttccgccgcacggcaggctgttccgtttccgaataccgcaacaggcttggccgctcataggctccccgcatcaaatcgctgtattccactttcgcacatccgagccgctcctgcaaatagtcgaaagcagtccacggacggacattggtgccgcatgtgaacaaatcgacagcggcataaccacactccggccacgtgtgtatggtcaagtgggattcttggatgaccaccacaccgctcacacccactggggcgtatttgtgaaagttttcctgtactatggtcgctccggcacttactgccgcttcgtgcatgaatgtgcgaatctgttccacatcgtccagtttttccgggtcgcagttgtagaagtctgcaaggatgtgatgccctaagggaaggtattgctttttatccgtattcccgtttttgtgcagtctgtcgaaaaccgtagctccgcatacattgcagccttgttttttcaactccctgatggtctgatattccgcctctttccccacggcatagactttgccgcattgccggcagcggtaacggttttgccggagattgcggtctgcggtgtagatgtcatcgcgccctcgtttttcgagaggaaacaaggcgcgtgtacgttctgtcgtttccaggacaaagagctgtcctttgttgcccaaaagagatgcgcccatgtattcattgaaccgggtgaacatctctttgatggccagtccgtgcagttggaaacatttttgcagaaagtaaacctccgttgccgacttgttcccgaacgagaaaaagattctcaatccggactcttctttcagtacgctaatggcacgtgacaggaacaaggaagctccctcttgcgtataaggcggatcggtgaacaggcagtcgaaacgcccgcacaaatgcggaggcagaggcatcctcaaatccacccgttcacaacttatcggcagggcgaaccgtccggccagccgctccagacactcgatataacgaccgtccatctcaagtacatggatgtgtgtcgggcagatgcttggaccgggataaagttctttcagcagaaacccgatggcaaggctgacaaaatcatcatcgcccatgcatacgatttgtctgcctgtcaatgtgccgtttgccaagcagagcaaagccctgcggaatgctgtctgtacggtacattgggcttggtccagtgctacatccgctacggggcgttcgtcgaatgccgcacggtattttttactcagcgcgtcagcgtatgcgtcccttgcctgttcgctttccgccagtcggcgatacaggcagaggtcaatccccttgaatccaagagcttgttccacatactcctttccgttatgagtaagccctacgcctccgctgcattgttccaatatgcccagcctgataccttcgttctttatggcggtcacgataggtaccggcaagagtaatttttgagagagggctttgttggaaagtggcgcaaaacaatacagctcctgaaaataaagttcaataatccgtcggctatccttaattgatactgtcttaaatattttgtcgatataatccatttattacatatcgttgatttacaggctgcaaaaatagaacaacatcattaagtaatagagagcaaaatcctgctgatatgggtacttttcaatacaaaggcagataggttggatatatggccagacggctcaggacttcatccaaacaaaaaccggtataggcggctcaatgaacgtacaggaagcggaggagtttaagacctcgaagttcttctgcaaaacggatttcgacatgaaggaaatcaagaagggggaagcggcgtatgtaccgttactgaagttccacacgttcaagtcgagggaggaacaggaacgcattctttatcggaatttcgtgaatgtgggaatggaggtaaaagaaatgataaaggacgtgctgaacaaacgggaaactaaatagaaagccagattccgatatgagggaactaaaaaacgcctgcaatgattccgtgattattgcggacgtttcggcgtttcctatctattgtgaaaatcttatagttcaaaatcagcttcttgcggccctacataaaagaagggaaatcaggtgttttttatataacgggtacatttaccagtccccctttttttgtataatacctgcatcttccgttttggagataaactcccgaacctgtttttcggacagtatatctgcgaatatttccttgaggacagcccggttgatacaaccatttttacggaaacaacaataaaatcctttcagtcttttaccgcagtttcgacgggagtttatgaaaataaagtcgtatctttgcactctctatcaaacagataaatccatgtgaacaaagggttgaacggacatatcgccatgctttcgacacaaattatttgtggtttgaatgtacctgtcggtaaatcgctcctggcagagtggatgacaccgattgggcttgcctcctctcgtgttttattcgccacgctgatattttggacgatcgggcttgttttcaggagagaaaaggtcaatgccaaagacttgatggtgattgctttgggcggtatttccggtgttgcttgtacttatctttcctttgcgtggggacttaattatacgacaccagttcacttcgcacttattgtcgccttaaatccaatcgtagttatgctcttttccgtattgtttttaaaagaagctatcaaccggcggaagttgacaggtgttctgttgggaattgcaggagcatgggtcttgatttcacaaatggatattgccgcatccgttgaaaatcatatacttggcattgttttcgccatcgtcaatacagttatgctcggattttatctgattatcatccgaagagtggcgataaaatactctcctgtcacacttcaaaaatggatgttcctatttgcagcattgtccatgctgccgttcagtataaatgaattgtacgtgcaaccgctttatcagtccgcgttctgttggcaaccattactccagcttgtattcgtattgttgctggcaactgttctcaacaatctgctatatcccgtcgctctcaaggggatacagcccaccactgccagcatttacatcaacctacagcctattatagcttctgtcgttgccattttaatcgggcaggacatttttagctgggatgaaccggtttcggccatacttgtcatatccggtgttttactggtcagtcattcacaaaataaaaaataaagctaatttgcggttctgtattcattgggcgtacacccggccattttcttgaaccaacggctgaagtgttgcggatatggaaatccaagttcataggatatttcacttatggacttcgccgtattgaatacccgctctttagcgacatcgagcattttctgctggatgtgtttcagggcaggcattcccgtttcttttttcatcaggtcactgaaataattcggggaaagacaaagtttgtatgcacaatattgcacagtcggcatccctccatgccttgcaggggcatcagaggcgaaatactcatccagaaggtcctcgaaacgcgctaacaggtcgtgattggcattgtcgcgggtgatgaactgacggtcgtagaagcggatgcaataatcaagcagcagcttgatgttatccacgatgagcgaacggctgtgcttgtcgatagatactgcagctcaatgcgaattttttccatacattctataaccgtccgtctttcttgtttggaaaggtgcagggcttcgttggcattgtaagaaaaatatgaataatctttcattatatgcgccaatggtgtacctcgcagaaattcgggatgaaatgcaacaacccatccttcgggctggtgcagctgcccgtcatcttcagatcccattacctgaccgggggcgaggaaaagcatcgtcccctgctgataatcgtatatactttttccatatttaagatttccacagttcgcatctttcaatagaatagcatagatgttatacagttttttcccgaaccggagaggcttccctttactgccttcaataacgctgaccaacgggtgcagggtctccacgccaaaatagtcgttgtactgctggactgtatcaaccttcattatttcactcataatttcctcttttttaagtcattgcaaatatagctatttttctgtgatagcttttcattctgcttttaattaaaagcaaagatacggattcccgatggtacggcatataccgaaatcatcgttttggataccaattttactggtataccggcatcgttcttaccggcccgttgaaattggtaattctatccgtgaaattgatacacaggctcttaattcccctatctaattttgcaatcagaaagataatcaaacagataacgacatgaaaaaagaacagattcaagagaacggcatcagtcgtcgcgggttcctgaaacgaaccgcattggcaggcgcggccatctgcatcgcgccggcattggagaaagtaacggccgcggaaaaagccattacaggtaaatcgtcagtatcggcagcaaccattccagcaggaatggcagcagtccgcgcacagcgtaccttgagcagcggcaaggcagcctttaccatttcggcgatgggcttcggctgcatggggctgaaccatcaccgcagccagtctcccgatgaaaagacctgcatccggttgattcacgaagcgatagaacggggtgtaaccttattcgatacggctgaaagctatggctaccacaagaatgaaaaactggtaggcgaagccctgaaaggctataccgaccgcgtgttcgtctcttccaaattcgggcacaagttcgtgaacggcgtgcaggtgaagaccgaagaggacagcaccccgacaaacatccggcgcgtatgcgagaactccctgcgcaatctcggcgtggagacgctcggcatattctaccagcatcgcgtcgaccctgcgacgcccatcgaggtcgtagccgaaacatgcggcgagcttatccgggagggaaagatactgcactggggcatgtgcgaggtcaatgctgaaaccatccgccgggcgcacaaggtatgtccggttacggccatacagagcgagtatcacttcatgcaccgcgcggtggaagaaaacggcgtgctggcgctttgcgaggaactgggtatcggtttcgtgccgtacagcccgctgaaccgtggtttcctcggcggcatgataaacgagtacacccggttcgacaccgccaacgacaaccgccagacgcttccgcgtttccagcccgaagccatccgtgccaacacgcgtatcgtggaggtactgaacgctttcggacggacgagaggcattaccacggcgcaggtggcattggcatggctgctgaacaggaggccttttatcgttcctattcccggcacgaccaagctctcgcacctcgaagagaacctgcgggcctgcgacatagtgttcacgtcggaagaagtgaccgagctggaaaaggccgtggccgcaattccggtcgtgggaagccgctatgacgctttgcaggaatcgaaaatccagaaataggaagggcgtatgagaaaggttgtcttttatatgatggccgccgccttgctgtcgggttgcaacgcacgcaacgggaatatcatgcaaatcgaggaacagggcagtttcgccgtgggcggcacggtgctcaccgattcactggggcgcacctatcacggcgaccacgcctacgtgttctatcagaaacccgtcgatgcccggaaatacccgcttgtcttcgcccacggcgtggggcagttttccaagacatgggaaactacgccggacggccgcgaggggttccagaatattttcctgcgccgcggtttccagacttatctcgtcgaccagccccgccggggaaacgcggggcggagcacgacacccgcgaccgttacccccgtcttcgacgaggagacgtggttcaaccgtttccgcgtgggcatctggcccgattatttcgagggcgtgcagttcagccgcgacaaggaggctctgaaccagtatttccgtcagatgacgccaactctcggccctcccgatctggatgtctacgccaaggcgtatgccgcactgttcgacaggataggtccggctgtcttcgtcacccattcgcagggcggaggtgtcggatggcttacactgccgcagacaaggaacatccgtgccatcgtcgcctacgagccgggaacaaacgtgccttttcccgaagggcagatgccggaggaagggaaagtactaaccctgtcgaagaagaccgaaggcgtggaagtgccgatggaagaatttctgcagttcacgaaaatccctatcatcatctactatggcgacaatctgccggaaaccgacgaacggccggaactgtacgaatggacacgacgcctgcatctgatgcgcaaatgggctgccttgctcaacgaacacggcggcgatgtcacggtcattcatctgccggagataggtttgaagggcaacacccattttcccttctccgatttgaacaacgtggaggtggccgatcacctgtcgagatggttacatgagaaaggactggattgagaaggcggagtcatggacgaaggaactttctgaaaatggcgggaatagccggcggaacgatgactgaaaacgactattgagttaatcgaacaacctttaacaattttcatatgataccattatttatcggaggcatcggtatgcaggaagtgctgctgattgcattagtcgtcctgctgttcttcggaggacgcaaaattcccgaactgatgaaaggcatcggcaaaggtgtccgttcattcaaggaaggtatgaacggcatggagaaagaaatcagtcccgaaaataccgacaagaaagaggagtgacatggcaaaggaagacaaaacggacggcttgaacttttgggagcacttggacgtgctgcggacggcgattgttaaaatcgtcgccgtggccgtcgtgttcggtatcgccgccttttgttttaaggaaaaactttttgccgttatccttgccccgaaaaacgacggcttcatcacgtaccgtcttttcaaccggattgcagcatgggccggcggcgagaccgggagttttgccgtgcagctcatcaacacgggactggccgggcagttcgtcatccacatgaagacggcattatgcgcgggtgtcctgtgcgcgtcgccctatatcctttaccagttgttccggttcgtgtcgcctgccctgtatgcctgcgagcggaaatatgccgtgcggatagtcggaggcggctatgcaatgttcctgatgggtgtggcggtcagctactttcttattttcccgctgacattccgtttccttggaacctatcaggtcagcggtgaagtggagaacatgatcgtcttgcaatcctacatttcgaccctcgtgctgatgtgcctgacaatgggtatcgtgttcgagattccgattttatcatggctgtttgccaaattggggtttctcaccgccgatttcatgcgacgttaccggaagcacgctatagtgattatccttatcgttgcggctgtcatcacgccgacttcggacgtgttcacgttgtcattggtcacattgccgatgtgggttttatatgaagcgagcattctggtcgtaaatagagctgcaagtaaaaaggcagtagacagataaagaaacgacatcttgaagtgaaaaacaatctgccggccaaaagataaaacaaacctttttacaataagaggtaaggtactgtaacacgtaggtaatccgttttataaacggcaggtttttattcgtttctgcattatacatagaaaagccgtaccctgctcgttttccgaaaggcacggctttcatcccctaaaaagaggaatcagacagtgacaacagttacatataaattctgtcgctcctgttcgcagaatttatcgtactcggctttgtccgtgccgctctcgatagcccggtcgataacgtctcccaactcgtcgaaacaaacctcttcgttcacacattccacctccattcctttcacaagatagacctcgtaataatccgatccgttgagtgcgacgatgacgtaccctgcgtgcagccgtccgttcaccttaatgcggagtgccggcaaatccctgtatagggtggcggcaaactctttgataccccacgacatgaggacggtcatgggggttaacgctactaactgttccttaatggtctgtgcgacctgcattacatattctttttccataattctaagtttataaattattattccatgatttactcgaaccaatcggggttatcctttttgagttcggctatcaactcgttttcgggaagctgaagcgttctctcgtcggtaaagaagaaaatctcgtcataaatcctttcggcttctttactggcaaaaccttcgttctcgtcattgaaactgccgggctgcaaggcatcgagcaggattgtcgaaccgataagcaattcttcgccatcgacagattccacgatgcgggagtaataagacctgccgttgaattgaatcttagttgttttcatatcgtcgtttttatattaatggtacattttttccgtgttcattgaggtattccatgatatgcttcgcttcctcgtgcgatgcccggttccggtcatcgtaacggcgtgtttcgtccgccatgaccttgatacacgccttaatcaggcggtacaggctttgctgaagcgtcgggtgcatgtccgggattgccgccgcgaaccgttcggggttgaaactgaaactgtttaccgccatttcccagtctttggcgaggcggtattctttgctttctttaatgtccatattcttgaattttaatagttctcgttgcatattctgtcaagttcctcaattatgggtgtcacctttttgcctgtaagactttctatgtcatacagcaagtgctccaagcgttcatacgccttttctcccgcttttgtaaattctccggtactgtcgaatgcgctaccttcgcagcccagttcttgcaataattcttctaatgtcttcatttgttaaattttaataattgtttttctttccctctgttcggcttccttgttgccggagccgcttcgggttttatggtgctttccggggctggcgaaaaagccctttccgacgttttttcttgccaattacgcttcgcagaaggaagaatttgcaagaaatgcacttcaaaacgacggaatcaggcgcgacagcccatatttgcaccgataaaaaccggtgcggtgacggacgggaaagccagacgggagagaatacggagacctgaaagcggtagaaaaggacggctggaagctaaaaaagagaatttatatatctatatatggataattgttgttatatttgcatataaatagtgatatattgacattatggaaacaacgaactataccacaaacagcgatatgctgacgcttttggcgaagcgggtcaaggagtaccgtctggccgcccgcatgagccagaaggagctggccgaacagtcgggtgtaagccagacgactatcagccatttcgagcagggggtcagccgtaacctgaccttggccaatttcatctccctgctgcgtgcgctcggtcaggcagagcggctcgcggagattctgccggaacttcccatgccgccgatggcgcttcgggaaatcgagaaactgatacctaaacgagttaggaggggcaagaaatgatagaaagtctcgatgtaatcctatgggataaaaaggtcggcacgcttgtcgccaatcgggaaggacaccgcagcaaagcctgtttctacttcgacagcgattatgtccgcgacggctacgacatcgccccgctccgtgcgccggtaaaaggggttgccgcacagcgcggcctgccggtctatcccgatgaagagcggcttttcggcggcctgccctcgttcatagccgattcgctgcccgaccattggggaaacaccgtgttcaacgaatgggccaaagtgcatcatatccgtatgagggacttgtccgccctcgaccgtctcgcctatatcggacggcgcggcatgggggcattggagttcgtcccgcccactgccgaggaactggagacaccgttcaaggtggagatcgctgacctctaccaactggcccggcaggctttcgaggaagccggacggttcaacgtcccggtatcgggcaacctgatggtcgaaagcctgttcaaggtaggaacgtccgcaggaggacgacggcccaaagcggtggtcaacgtcaatttcggggaaggacaatgttactccggacaggtggcgaccccttatccgggctacacgccgatgatcgtcaagttcgacgaacaccagaagatgccgacgacacggatagaatacagttattacctgatggccgtagacgccgggcttcagatgatgccgagccgcctgttggaaggtgagcagacagcgcacttcctgaccgagcgtttcgaccgccggaacggcaagaaggtgcatatccagacattggctgccatgaacccctcggcagattcttacgaagcactattcgaggcggcctgccgtatcggcgtgccgccgggggaactccggcaactgtttcgcttgatggtgctgaacgtgctgggcgggaacgtcgatgaccataacaagaatttcagcttcctgatgggcgatgacgggcgttggcacgttgctccggcctacgactacacgttctcggtcgatccggacgcaccgtattacgtcaaccgccacagcatgactatcaacaaccggacagagggtattactgcggcagacctgctggaagtagcccgccggtacggtataaaggccgcagagccgttcatagaaaagaccataggcatcgtttcgcgttacccggaatacggccgggaggccggtgtcggagaggaatggataggaacgatagaaaaggaaatcgctgcacgagtggagtgcgtgcgagccgattaaaatagagcatgggatttcatgcaggggaaatgaacccacccgtttttgtggcgggtgggtttgtcgttgtcattccgcccctttcttgcttaggagggtcaactggtcgggacggtcgggaaaccaataggcgtcgctgtcaagatatacgcatctgtcaccattccaaggcttcctgaaagctaatacctcttgagggccgaatactactccataatcgtttgtaaatgctaccatgtcgcctacggccaaatcgtcctccgtttccatgacttcggaaaggcgattataaaactccatgccttcggcttcacgttccgctttccagcgcaaaaaatcctctttatgacttctgcccgtgtttatcggcgataattccgaaggcaaaacctccgcttccgaagtaccggacgaaatcagaataatgctgtcgtcttccatgttttccggtgcagaaatcactcggtaagccccatcggacaaaccgttgtccgggtcatgccaataaagcagattccctgtcttgataaaatcgtattttcccattgtcttgtgaattattgattatttatttcccttttttcgatccttttcctttggaaccgcttcggggttttactgatgcagtacacggtcgtcggcacagcttcatacgacggctcttcttgccaattacgcttcgcttgggaaggaagaatttgcaagaagtgcacttcaagccggagaatcaagcgcgacgaccgactttcgcatcggataaaacccgtgcggtgagggacgggaaagccggacgggagaaacaggcggctcgtgccgctacaaaagggaaagaatgcaattataagaggaaacgggcggtggcggggtatccgggaggctgactataaaaggacgaaggcgggcgataaagacaaaggagatagcgcactgactgtgttatcagtacgccatcttgtacattcaatcttcggaacccgacactttcatttttgggaacaatccttttcaaaagcattcttctccgaatggctcgatgttcgctttttggaaaatttgcgggttatgctgataaagaagcggcaggttcaacatagccatagggtattccacgaagccgctcctgcgtttgtagccggaatcggtcgccaatctgttttctaccaaaaagtccaacgcatccgggtaattgttcacgtcgataaaggtacggtccggcaaaccgagcgcatccatttcctccaaattgacggaaagtacgatatattcgtcttcatcttccaccattaccaagataagagccaaccagccattgcgataaaaccgtggtacgaggtaataccgttcgcctctgaactcgtattctttctgtctgaaagagctgtccggctctacgatttcaaattcatcttcacctgcggtaaaagcaatcatagggttgctggcatctacatacgcttcacctgctttgtagcacaaatactctctgttttcggaacgcacgatagcaaattgaatttccataaaatcttaacattaatcagttgaacaatctgtttattttttccctcctttcggaagccttcaggcttctcctgtcgggatttgatttttacgtgcattaaagattgcctttcagggagaaacaggcaaggaatttgggcagaattttatagttgcggtattgagcgtccgcgaaatatggacgattgaaaatcgggaaagctgctgaaaaattgtgttcaaatagcgtagcggtacttgaatgttcctccaaggcaatacctttgcaccggaaaaagcatgtcccgacgggcagagccgttggcgaagggatttccgtacaaaaggaaaacgaagggataaaaagggagatctgccaacggcagtgctaaaaaagacagccgctcctgcggctctctctctgtagcgttgcgctatttcttcccggtcttgctatccggttcgtcttgccgttttttcggggtgaacagtccattgaaacagaccgtcgtggcaaaagtacgtgcctgcgtggcattgcacaatcccgctccgggcattgtcgcaccgttgtaatgtttgcagtccttacatttcatcattacctcttttgattggttagacagtaggacggatttctccgtcctactattgaattatggtcaagctgcgacctcttcgggttgcgtatgttcttcgggttgtacctctgccgtgggttgtgtattttctgcctcggcggcttcttcgggctttgtctgccgttcctttgccaacaaggcggctttgcgttcctcgatacgtttatggcgtttctcatacacctcattatatccactttcaatttcggcgagcgtgtcgggcatgtgcttacgggcaaaatcgagcaagagggtcgcagcagcgttattgccgtatgcgcctttgaagttgtctatcaagaaatccctgcggataacggctttctgcttggccgtgaggttggcgatgatgttcattttttcttcgtcctcaaggtgttggtaggcttttttctccccgataccgaataccccgaagtgttccctgcggagagacgacagcaggaagaaatatatcatcttttcctcgtcctgcgtgaatttgctttcagacgtatcaacgtccaaaatctgtttcttagcgtctgcaacggttttctcgacggctatttccttgttacgtttgtcctgctgttccaatttttccaccggggaaagttgtttttcggtagccatgtccgcattggcggcagcacttgccatgtaacacagcgtaatttctttctgcccgatgcagatataaaacgtgagttcgcccgtatcgattcgttcatgaattgacttgcatttttccatatagttgctgaaatcctgctcgtactccttgtatgccgcctcgtattcctcggtagtgtcgtattcttccttttcgggtgctaccggcgtttcggggtatgccgtggcataggtattgaggtgctcgacctcgtaccccatagcggtaaggcgttccaccgcaagcatgttattgttgaaatcttggtagcccaatgatacggaggggtattgttccacaaactgcaaggctttctccacgagataggaagcgttcatttcggccagacaactccgattggcgcaatttccgcaaccaccctcgcagaacaacatcatgttgttggtattgtgggggcatgaggcgcatagggtcttgtcgaatgcgtaacggctaaggtctgtcgtgaaatcccgttcgataaactttgccacatcggcggctttcagtcctcgccaacagtcgtacaacatgctgtcgctgtctttcaagtgtttatagtacacctctttctgaatgtccgtaccgtatcggcaaatctcactcgctacactgattgtgatttcgtccttttccagaagttcggcgatttcgggtatcaatgatacgaatttcagacgggtacggatatagttctcgtttttgccgaactgcacggccaatgactgcacatcgtagcgaccgctttccatgagcttttggtaggcgttggcttcctctatgggggtaacgtccttgcgttgcaggttctccgtcacggccatttcggcggcggtctcgtccgaaacatgcaagatgacagccggaatttcggtcagttctgccataagggcggcacgatacctgcgctctccgaaaataatctcgaagcggtcggtgtccacaatggggcgcacgccgataggttgcaatactccctgctgacgaatactctcggccagttcggcaaggctcgcctcgtcaaagtgcttgcgtgggttatagttgctcggttgaatattcatcaatgcaactgatacgatgttgttctctactactgattgaatgttcgctgtttccataattcataaattttaatttgttattacattagattgtttgattactattgtctttattgtgcggtgtcatactcgtatatttccggattgtcgtacccgtcgaacactatccgaaacgtgtcaaagtcctttctgcccgccagtctgacggtatctcttttcccgatgaaatagggttcattcattgtccgaaacggtgcgccgagcgttatcctatccaccaacgtacaaactttgccgggttgttcgggcatgatataacccagtgcgtactcgttgtaaactaccaatttgattttatccatatcgctgtcaattttacgttgtttttttctttccctcctttcggttcctttctctgcctgaaccgctttgaggttttacggatgcggtacacggctgtcggtacagcttcatacgacggcttttcctgccaattactctttcgcagaaaggaagaatttgcaggaaatacacttcaagccgccgtatcaagcgcgacagcggacctttgcatctgataaaacacaacggtgacggcagagaatgaagccgggaaagcggtaagggaatcggtagaaaagggatatgcccgtcagggttagaatagggataaaacgggccatgtgcctgtacttgcgggcaggtaaaaaagagaaagatggtaagactataaaggaggaatgcgccctatggaaacagcgggcggataaaaaaggacgcatggctgccgtctccggggtgggcagacgcggtagccatgcctgtgtttattgttcgttcttctccagatactctttcattgcctcgttcacgatgtctttcagcgacatgttcttcttgatggcgaggaatttcatacgggtatgaatgcttttgttgatgacgaagttgcaatgaaccgccgtttctttttccgtgggggctgctaccggctgttttccgccggtagtctttttcgtaggtgacagcaacccgtccagtccgcctttcatgctgtctttcagtaaatcgctcttgctcatatcgggattattttaatttcagtacctcttgcgccagtgccatgtagtccttggctccgttgctgttcctgctatactcgaagatgttcttgccctttatgggagcttcggccaaagatacgttatcccgtataacggtcttgaacaccttttcgcagaatgaatccttgacgagttcggccacacttttgttcagtgtcttgcgtttgtcgaactgggtaattacaatgccaccaatagcgagtttcggattcaggcgttcctggacggtggcaatcacattcatgatcttggccatgccgcgcatggcgaggaattgtgcctgtaccgggataatcaggtagtctgcggcggtaagggcgttcagcgtcagcaaccccaacgagggcggacagtcgataaggatataatcgaatttccggttttcgagcaacttgccaatcaggccgttcaatatcagttcccgtcccggctcgttgatgagttctgcctcggcagccgagaggtcgaggcaggacggtacgacggttacacctcctgccgtttcaactaatggcaaggggtatttgcctttcatcgccccgtacaccgtctgttcttcctcaatggagaggccgaaggattccgtaaggttcgcctgaccgtccatgtcgatagccagcacgcgctttttcttttgctgcagggccgcagccagattgatggtggtggtcgtctttccgacccctcccttatggttcaagaccgcaattatttttgtcatcgtttcactcttttattccacttgcaaagttaatactatttttcgtaaatactaaaattagtatatactaattcactaaaaactattgttttagcagtgtagtattttagtatttactactatactaaaataaagtttgactaagagtagtatatcctacattcgcagacgagtggcttactaatctactacatataggatatactacatttagtattcgcttattttcaaaggtttactctcttatcagaaaggcaaatcctccttttcgtcctgcgggaaatctgcaggaggaacgggtgcgccgtctgctccgcttactgcattgtcctctccggctgccgcgccttcccgccttccggtattgataaaggcaatactctctgccgtgatggagagctgtatctggctctcgccgttcttgtctttccacagggaagatgacagcgtgccgtcaacaagtatgagtctccctttcgtcagatattcggacaagcggatatggttgtccttgttgctgcgtacccttatccaagtggtgatgttttgcccctttgaataatcgtcaacggctatgtccatagccatgaatgagccgtgtgctcctgaaattacttggcaatctttgccgatgcgtccgatagtgtgaacatgtaacataatagaaaattgtttgtggcaaggtggttggtcctgccgttacctaactgtttattttttccctcttttcggttcctttctctgcctgaaccgttccgggattttatagatgcggtacccggctgccggtacagcttcatacgacggcttttcttgccaattactcttcgtagaaggaagaatttgcaagaaatacacttcaagccgccggatcaagcgcggcagcctacctttgcatctgaaaaatcggacggtgacggcagagaggagaccgtagaggttatacatataattgatataaagggaagagggcttcgcccaagtataagagcagaggaaaagagagaggtataaaaggaaaccgccaacggagttgcggtaatttacaaacgggtatcgtgcccttcaccgacgatgttgtcataggcacgataccttatcatagcttattttgtcagaaccggtatctcaaagggaggaatgcagcaaatcgcccatcctttgttctggcaaagtacaaaaccctctgacgatagtatctccgtttacgccttcaagtccggcgaacatttgtaatgcgtcaaaccctctgtcgaactgttccatgatgacggcgggggcaaaatggataatcccgtgagggtagcttttcgatgtgccaatccacccgcgcaaataatcatcgaaacagccttctgctcttgacgcatggaactcttgtgaatgggaactgcaaatggttttaccgtagatttcgtctcctaaaattaaagttcccgtttgcggattgtacataaaacgccgattggttatttgaagaatatctatgatttcccatttgacattgataaccatcaggattttttcaacctgccttttcatgcgtttgcctgttttacaatttttcttgtccatcacttgtcttttatgccgtgaaacatctgcttttttacccttttttcgattcttctctctgtctgaaccgttccgggattttacagatgcggaacacggctgccgacagggcttcatacggcgggtttcccggccaattacgctttcatggaaaggaagaatttgcggggaatgcacttcaagccgccggatcaagcatggcagccgacctttgcatctggcaaaccggacgacaccggcagagaggagaccggaacagaccggtaaatatgatggtaaaaagggagtacggctttgcctgtataaatgcaggggaagcgaagtagaaaagggtccggcttgggcgggtccggcaagggtctgccggggcaaacatgaaagggattctccttatccgctccacgcctgaatttcgaccgggcggaatgaaagcgcggagcgaataagaagtatcaccgtttgcccttgacgtggcaggtcacaagggaaagatacggaacagaggcggaaagtccgaaaccagcggcataaagaccggtcgggctgtggaataccgtgttgtttcgacaggtcgaagctccggcatggaacggcacgatccgggctgccgccggttttgaacggcctcccgtacctttccctgacgacttgttacggcacagactttccactggttcacggggttgggaaagccggcgtataatagggaaacagcctgaaggtaaaaaaggagtaatcgtactataaaaggtatcggttgccccgcaatccgtccggagggctttcgcccatcggacagaccacagaggttatcggcttatagtttgggcttgttcttcgggagaatggggcaagaaagtattattctgtaaaatggccccagctcggtctttaccgggtctttcgataccaagaatgttgcgctctccttgaccttcgctatatccaaaatggtcttacagatgtacttattcctcaaacgtgttcctcccctgttgaactgcagcggaaaacctcgcttgtcagtggttttgtgcagaaaccactctttcgggttgttttcatcacagccaaactccagtcggtcgttcattgtgatattcatttcttttgccaatttggtggatagatacatgttgccggtaacgctgttgaaccttatgcttcttttacctacacggttttctcttgtccggcaattctcgacgttgtaaattacaaatttcattttcttgaattatttacgggttatacaaattacatgcttacgtgggcgtaccttttggaaaatccttcgtgattgcggatagtgtcggttatatcgcttattctccggtgtatcgcacttgcggaaatgcctgcataggcggaaaggtgtctgtatgaacatttcgcctcgtactctttcagtctgaaaagctcgtagtccgtttggggatatttcttcttcacaaacagcagtatgtcatacaccagcttgtcggaagctgccagcacctcgacggacggtgtttcttcttcctgcatgagcaaaaagaaatgttcgttgtcggggaaacagtaacaactatccttgtgaatacatttcagtctgcactttttgtacacgccgaaaaaataaggctcgaagctctcgacaggtatttccgaaatcacgacttcccgtttcatcgccaaataggcgtcgtgaaaggcgtcctcgtgcaggtaacgtccgaatatgttacgcaatctctgatagttgtaaacgaaccagttgtcaaaaagcgaattttttttcatgtttcaatttgtttttaagttttttttatttccctccggttcgagcgattaccggaaagttcgattcttttttctgcctcgtctttgcatcacggggtttgcagcaaggattccatgaaaaatactcttggaatggaatgagaaggaagatttttcatcaggaaaatcgaagatgggccttgaggcaaagttttgagatgcaatcaactttgcggaaaaaagtgtcgggctttacggtcgtcggttcgtgatagcatctcaatctacaaaggggggggaagcgaaagcctgcctataaaagacaaggtgtgtggtataaaaggagtggctggaggtacaaggggaagattccgttacaaccgggtatggccgtggcagaccggaaggtgaaaaaatcccctgtccggtgttgtaaccgaacagagggaaaaggttaaatctatgaattatggtcatgccgctttgtcggtggcctcgtgttcggaaagggcggactgcgtgcgttccgcctctttcatgctttcgtcgatccgatgctgtaaagcgttgcactcctgtttgagccttgccaactcgtccgccttgctccacttgcgggcgatgattccctgcaaagcgggtatctcgctctccagcttggctatcttctgccgttgttcctcaatcatgccgggcagcttggcgagggcggcttgcgggtatcgggaggattccacgaagcccagaggcaatgctcccgatatgccacaacggtatttcagtccgcttacgccctcgacgaggaacgtgttgcggtagaatgtaccgcccatgtcatactcgctgtacaccgacaggttcaatccggcatacgtgcctatcgtaccgattgccccgttgcggtaggtcttggaaatgcggtgcagctcccgtccggtctcttccgccgtggcttgtgcgaggttcaacagccgggtcgtccggtctccggtgtaagaggtgatatattcccagtcctgcgtcatgcgtgccgccgcactctcggcctttgtcatgtcttcccggttggccgcaatcttacgctcggccctgatacggtctttcttgaaaatggcctgttccttttcgagctgcataatcttattgtcgagcttcgttttctccaacaggtcggtatttcccgacaggagagccacgaactcggcgaaattcatgccgttatcctcgtccatagcgtcctcgtcgatacggcgcacagcaatcgtaccgttgttaatttggttgatgaacatttgcttggttttcaacaggttaaatttgtaagcgtcgagcgtcttttccgttccgtaaatcaccacgtccacggtattgtttccccagagcttaacggtgttgcctttgcgtaccgcacgaccgttgcgctgctccatgtcggcggggcgccaaggtatctccagatgatgcaccgcaacggccctttcttgggcgtttactcccgttcccaacatcgaggtagagccgaacaacacccgtaccctgccactgttcatgtccgcaaaaagtttctttctcgcccgttcggtcttggcgtactggataaactggatttcatcggcaggaatccccattgccaccagcttgtccttgatgtcgctatagatgttccactcgttcggcttgtaagtggcaaggtcgctgaagacgaactgtgtaccacgattggcatttgaacttacataataatcataaatagttcttgcgcaaatcgaagccttgttgttcgggtcatcagtaaacttatcgcccaacagacgcatatcaagagacatcttacgggccacgttggtagcaacaagcatttttgccttgtcgagattgtccggctgcggaatatccaaccccaaatcttcccattgtccgctgtgcgcaaaggcgacgagccgcccgatcatttcctcctgttggatagtgggtgcatgggaaaggaaacgcacgtttttgtccggcacatcgaggtttatcatatcggctgtacgatagtcggtaatctcccgcaggaacatcgccagttccggcactttgatgtaagtgcggaaacgctctttgcgctttatcgtacccgttacgttcagctcgtagtcggcggcctttttcgtgaagatagccgcccaagcgtcgaaacagcttacttgttgccgtttgagttcccttggacgcagatatttgaacatcacgtacagttcggtcagcgcattgacgaccaccgtacccgacaggaacgtagcccccaagtcctttcccgtgcggcgttgaatgtcccgaatggcaaacaaaaggttcatcgccctttgcgagccttgcgcattgccgatgcccgctactctcgtgtggcgtgtctggaacatcaaatttttatagcagtggcattcgtctacaaaaatgtggtctatgcccatcgaacggaaatcgatggtatcgtctttccggaggtctatcttcatctgcagttcggcgagcttggcttcaaggttctgtttccgggtttccagtcctttctgcatcctgccgctccggtaacgcatagtggattgctccagcacttcgaggctgcgctccacatcggccagttcttccgagaatatgtcgtacatggtttcttcggattgcggaatcttgctaaactggtcgtgtgtcaggataatgcaatcccagttgttgttcttgatttttgaaaacacttccttgcggttggcgggggtgaaatcttccttgcccggatagagcaccttggccgtggggtatgcctttcggaatgtatcggcaatctcgtgtacattggctttcagcccgataatgaggggtttctgcaccagtccgagacgtttcatttcgtatgcggccacgcacataatcatcgtcttgcccgtgccgacctcgtgccagcagataccgccgccgttctgcttaatcatccagatagcgtctttctgtgagggataaagttctttgtacgggaacagctcgaaagagaggccggggaacgtctgcgccgagccgtcgtagtgcggacgcacgtaacaattgaagcgctcgttgtatgtccttaccagttcgtcccggacttccaaaggctcatcgtcaagccaccggttgaaacggtctctaatttcctgtatcttggcggcggcctcctgcatggcttcctcgtccggcacacgtattttgctgccgttccggtattcctctttcgttatctcaggtacggtatcgtgcagggcgtgtacaaacaagtcctcgccgttgtaattgcgcacggaataggtattgtatgccacgggcgaatatccctgcagccgaatcaagtaggtatcgttcacgtcgaaatacatcacgtccgcacccactccgaataggtcggaggcgaaatcggcgtacagcttcgtatctatccaccgctcgcccatgttgatgtcgagttcttcatagggtatcggttcgggtatggtgttctccagtgcctttgcggacgcttcggcccattctttctccttgcctgcgagattcgggagaaaggaaagcgtctcttcctgcttggcgatgatgtttccggagaggaactttcctttgtgctcccattccccattggccggattgtagaaaatttccccttgcagggcttcgatgatttcttcttcctccttgttcgtggcttgtgccatgtagcccatatcgaccttgccgtaaaagttcaggctgcttgccaaggcttccacgggggacagcgttacggcggtgtctatcttcttgaaagctacaggttcacgcataacgtcggctttgaagatgtccctgccgacctgcatttctatcgtgaacacctccgtaccgaggctgtcgagcaagataaactccttgttgtcgttgtcgtggaaaaatccccatttggcaataaaagcgtcgtatagggtgttgagttgtttacgcagttccgagcactccttttgttcttcccgttccctgccggacagctcgaaatacaccttgcgtatggggaaatagtcggcggccctgtccgtatttaccttgccctcgtccacgggtacgaaatcaacggctgtctccgtgtaacggctcgacttacgaaaccgaagcgtacctacctgcccctcgaaaacgaccattgcgccgttcttcatccatgtttccatgtcctccgtgtaggcacgtatgcctttgaccgtctgcggctcgccgaaaagagacatctgcacgggggtgttgtcctggccgtgattggcaaaaagagccttgcgaaaatagcggtcgaaatcgtatttgagcagtgcggaaaggtattgggacatggcgtttccatcgcctaaccactggtatttgcggacgtacttaccgaactggttcagcgcaatgcgactgtccgtggcaagggcggtcttggggagggtaaagattttgttcgcatagtcggtcatcgttcctgccgtgtcgaccttttccttggagacctgcaaaaacatcttctcccgtaacgagagcgtcgccttgcggctgtgcttttggaatatcaaaaggtcgctccctacctctatgccgctcgtctgcatgaaaagggtatcgggtagccgtaaggccgttatgaggtcggcatgattgacgaggtactcgcgcacgaacttgttgcccggcgtgtcggcaattcctctcggcgcaacgaacgccagcagtccgccctcgttcaacagttccattgccttgacaaaaaagtagttgtgtatggtcttggctgactgttcgtacatgccgcctttcttccacatttccgcatcgaacacccggaaattgccgaacgggatattcgaggcgataacatcgaagctctcatgctccagatgctggtcggctatcgtctcgaagcctgccgttaccgtggtcgcctcgtcatacagaagcgacaggataagccccgtaagacaatctttttcaaaagcgtagctgcgagtgccgggcatggagacgggcagaaagccgccaattcccgcactgggttcaagaaaggtactcatttgcaggcagttatccttgaatgtagcgtgtatctgccgggttactgcgtccacgaggaatttcggtgtgtaaaaagcagtcaggacggaggattttatactgttgatgacggcttgccgcatggcgtcgtcataatagggatatgcgcctatcaagtcctgcagcttgcggataggctcggccacatcatcgctgacggtatgctccgttcctatattcaatacatctttaatccccccgaaaccggaatatcgggataatacctctttctcttcgtcagtggcttgtcggtcgtcgatacggactttcattgccgttgcaatggcttccacgtttgccaccagtgattttaatttgctgtaactcataatttaaccttgtttgtttccctttattcggcctgtttgcggcctccgggattatttttctgcctcttgaaggtggcagggacaatcggacaaggctgaagcgaaaaaatacgctcgacaacggagaggaagatttttgcgcctcactcgcggcgcagccggcattggcaagattggaacggcccgttaccttcgcggaaaaataataccccgcaggtcgctgcaaggctgggcacggaaaccgacagctaaaagagggaggaaaatgcgtacaagggagaaaggacggaacgggtatagaaaagggagaaagcgtcgtacaacggggaatgctgccgacagaccggaaatccggagaagatgggataagacaagggaatcctgtgcataatcaaaagaaaaacttacccctgtaaccgattataatgaataacctatgactgaaaagaatactcccatcttatctcccgaatatctcgatttcagaaacgagataacctcccgcatccggtcgccccaatacgaggcattgaaggccgtaaacaaagagatgatcgccctgtattgggaaatcggcaggcggattaccgaacaacaagcggccttgggctggggaaaatccgtcatggagaacctttcgcggtacatacaaaaggagtttctgggtataaagggattcggtgtttccaacatgtgggacatggcccgtttttataccgaataccggtcgaatgaaattctccaaccgttagttggagaaattagctggtcgaagcacatcgtcattctgaccaagtgcaaagagatgcaacaacggcaattctacatcttgtcaaccaagaaatacggctggacgaaagatgtacttatcaacaagatagaagcaaagacctacgaaaattatctgctcggtcagagcaacttcgacatgaccttgccggagaagataaagaaccaggccatacttgccctgaaagacgaatatacattcgaccttgtgggcctttcgaaagaacattccgaatacgaactggaacaagcgattataaagaatatccgcgcgttcctcatggagtagcgagatattcagttttttctaactgaaagtgagtacagaaatgttatcatagcatggcagagactatttgtcaatccactcttttagccgttgagccttctctttactaacggttatttttgtgttcggatacccttttaagcggacaataagtttccctccgaaataattagaaagaaacaatacgtattctatgttaattatgtattggcggttggcacggaagaagcaatcaggattgagttgctgttcgagttcgtccattgacatattgacaacttctgaagttccattattaagacgaaggtataccgtcttgttttcggtttcgatatggttgatgtccgaaacacgtacggtcttatacccgtcacgatagggcaacaggaaacgttcccgatagcggaactggttcttctgcaacgaatcgaaaagctgccggagattttcgtcagcataattcttgccagctttggtagctttatctatggcagcttcaagttcatcggcatccaaaggcttcagaagatagtcaaagctattgaacttgaaagcctgtaccgcatattcatcgtatgcggtggtgaatatgattggaacggttgccggagcatatttaagcgcttcaaaactcaggccgtcagtaaggcggatatccgcaaggatgaggtctgttgttttgcctgattggaaaaaatcgaccgcctctttgatatttgtaagtggtccttcaattataaacgtcgtatcaatgtcgttcagcaatctaatgagacgcatggcattgcgctgttcgtcttcaagaatcagtatcttcatagggactgtttttttatgatgggcaaactcaccgaatagaagttctcggcattttctatcttgacttttttatcgcagagcaacgaataacgctctattatgtttttatgacccaagccggtcgattccatttttgagagcaagggagatttaaggttgcgcactgtgatatagtcgtcagacaacgtgatgtcaataaacaacggattttccatcgaaaaaccgttatgctttattgcattctccacaagaagttgcaacacggccgggggaaggtatcctttgcattctttcagttcgaggctgatgttcgtgacgacccctccgacgtggcgcacctgcatcagatacaagtatgattcaaggaactttatctcatctctgacgggaatcagattccggtccagattggtgatgatgtaccggtacactttcgacaggttactcaggaacttgccggcaagtttggtatcttcctctatcaattccagcaggttgttgaagttgttgaacatgaagtgcggattaatttgcagcttcagcgagttgagttgcgactgtaaggcaatctccttctccttcatcagtgccatttcaagagcctgcttctcatcgcgcgccctgatgtatgactggaggtagaatgtgttggcataaacgcttgatatgaaagtggctatcatggcaaaagtgtaagcccccttcatgttgatcagttcgtcaagaagcccgttgccggtttcatcccacaaaagattgaacagagatgtcatgccgaacgtaacgaggttattcagcgtcaaaagacaggaagcatagacaatcacccacacataagatgttctgaacggcaaaatcttaaaaacaaggtaagagaaccccaaggatatgtaggtaaagagcatacacaacaaaaaatcgacgacataatcgactgtcgccattcccggtaattggttggcggtttcgtcatcaagaattaaccatataataaggtagaggatataggaaacgagcgatagcaggaagccgttccgccagttcattatttttacattttctttgatcatatttggttgcaaagttacttcatgttgcaaaggtacgactttgctttttcatttgataggtcgaaaccggatgaaacagacaaaacagcagttgaaacagataaaaggagtgtcgagacagatggttctatcatttatactgtattcgatgcttgcataatgaacgtagattgccaaaacagggtatgattttggtaatctgtaggaaggtgacgcatcaagaagcatggcttaactgcccaaagatgtgcatctttgaaaagagcatttacaatgacatttcagaagccattttagctgttttataaatgttttttttcgtttcgactgcatgccggttgtcggcaaattgggtatggaatatctttgcagccaaaattggcgacttatgattattgaaacagaacaccttatcatcagagattttcaggagaaggatgccgttggtttgctggaatacctctcccatccgcgtgtcaactgcttcgtgagcgaacgcttgtgctctgaagagtctgcactggcttatatatccaatactccaaaggagttgctgcgctatgccgtgtgcctgaaggaagacgatttcataatcggtgatgtttttgcattgcgtgaagaagccgacacattcaacgtgggctggcatttcaaccaacgcttcgagggcaagggattggcgcatgaagcggcaacggaatttctggattaccttttccgtgaagcaggcgcacgtcgcatctacggctttgtggaggatgacaacctgcggtcgaaaagattgtgcgaacgtctcggaatgagatatgaaggatgcatgaaggaattcatatcgtttgtgtgccatcccgatggaacaccacggtatgaggacacctgcatttatgcggtattgaataaggaatggaaaaacaataagaacagatgatgaatagaagaacatggatagccggcatcacggtaacaagcctgctggctgcattattgacagcctgcaaacaagaacagagggaacaggaaatgagacagacattgcccgtcatggtggtttcttcccgggcagttgaatttcaagaaagttattccgcctccatccgtgggcggcaggatgtggacatagtaccccaagtgtcgggccgtatcacccgcctgtgtgtgaaagaaggggagcaggttaagacgggacaagtgcttgccgtcatcgaccaagtgccctatcaggcagccttgcgcaccgcacaggcaaacgtcagcgcagcacaggcaaaagtggaaacggcacggatcgagctgcaaggcaagcaagccttgtttgatgagaaagtcatatccgattacgaactctctcttgcccgcaacgggctggcggtagcacttgccgaactcgaacaggcaaaggctcaggaaacggatgcccgcaacaatctctcctataccgagataaaaagtcccagcaacggagtggtaggcacgcttcctttccgcatcggcgcacttgtcagtcccggcatgacgcagcccttcacggtagtttccgacaatgcggaaatgtacgcctatttctccgtctccgaaaacaagctgcgtcagttcaggacacaatacggttccatagacaagatgatttcccaaatgccggaagtcggcctgcaactgaatgacggcacgttctacggacggaagggacgcatagagactgtcagtggcgtggtcaatgccaccaccggggcggtgcaaatcaaagcccgcttccccaaccccgaccgtgagctgctgagcggcaccatcggcaatatcgtcctgcaaggagtggatgcggatgccatcctgctgcccaagaccgccaccgtggaattgcaggacaagattatcgcctaccgcctcagaaacggaaaggccgaagcagcctacctgaccgtggaccgtctgaacgatggtaaccacttcgtggtgaagcaaggtgtgtccgtgggcgacaccatcatcaccgaaggggtaggacttgtaaaggaaggaatgattgttacacctaaaaacgtaaccccatgaatctacgatttttcatagaccgcccggtattctcgggcgttatttccgtggtgattgtcttgatgggactcatcgccatcaaagtgctcccggtggagcaatatcccgacattgcaccgcctactgtcaacgtgttctgtacctatcccggtgcgaatgccgaaaccgtgcagaaagcggtaatcgtcccgcttgaggaagccattaacggagtggaggacatgatctacatgacctctaccgcatccaacacgggcgatgcttccatcaacatctatttcaagcagggtgccaacgcggacatggcggcggtgaacgtgcagaaccgtgtgaatggcgcgttaagccagcttccggcggaagccaccaaaagcggcgtcacgacagagaaacagcagaatgccgagctgatgactttcgcgctttactcacccgacgaccgtttcgaccagactttcctgaacaattacatgaaaatcaatgtcgagccacgggtgaaacgtataggcggtgtcggaaaggcacagctgttcggctcgaactacagtatgcgtttgtggctcaaaccggacaagatggcggggtacgggcttatcccggatgatatttcggcggtattggcacggcagaacattgaggccgccaccggttctttcggacagaactccgacggggcaaacgagtacacgatgaaataccggggcaggctctcgactgcggaagagttcggcgaactggtggtcaagtccctgcccggcggcgatgtattgcgattgaaagaggtcgcggatatagagctgggcgatgagtattacaattattcatccgaagtgaacggacatccggcagccatgatgatgataaaccagaaatccggttcgaacgcatcaagcaccatcaatgagatacacgaggtactcgatgacctcagccgcgatttgcccgaaggggcagagtttgtggtgcttaccgacaccaacaagttcctgaatgcctccatccattctgtcatcaggacgcttatcgaggcgatacttttagtcatcgtggtggtgtatgtgttcttacaggacatcaagtccacgctgattcccacgatttctatcttcgtgtccatcatcggaacgtttgccgtaatgtcactgataggcttttccatcaacctgcttacgcttttcgcccttgtgcttgccataggcacggtggtggacgatgccatcgtggtggtggaagccgtgcaggcgaagttcgacgaggggtatcagtctccggtgcttgccgccgatgatgccatgaagggcgtgtcgtcggccattctgacctccacccttattttcatggcggtgttcttccctgtgggcatgatgggcggtacttcaggggcgttctatacgcagttcggtatcacgatggcggttgccgtgggcatttcggccatcaatgccttcaccctttctccggcattgtgcgccctgctgctgaagccttacattgacgagcacgggaacacgaagaacaacttcgcggcacgcttccgcaaggcattcaatgcggtttttgaccgtttgagccgtcgttatgtgcgcggtgtgctatatgtcattcatcgcaggtggctgctgtggggcactatcgcggtatcgttcgggctgttggtgctttttgtcaatacgaccaagaccggacttattcctgaagaagatacaggcacggtcatggtcagcatgaacacgaaacccggtacatccatggcgcagaccggcaaaaccctaaaacgtataaacagccgtcttgacagtatcgcagagattgaatacaacggtactgtggcaggcttttctttcagtggctcgggaccttcgcaggccatgtcttttctcactctcacggattgggacgagcgcaaaggggaagggcagtcggtgaacgatgtaataggccgtatttatgccgccaccgccgatattcccgatgccaccgtattcgccatgtcgcccccgatgattgccggatatgggatgggcaacggttttgaactgtacttgcaggacaaaaacgccggagacataaccgccttcagccaagtgaccgaccggtttgtggaagcgttgtcgggcagaccggagatcggtgaggtctattcatcgttcgcggctgattatccgcaatactgggtggatatagatgctgccaaatgcgaacagtccggtgtgtctccttccgatgtcctgtcaacactctcgggatatttttcgggagaatatgtatcgaatttcaaccgcttctcaaaactgtaccatgtcaccatgcaggctcctgccgaatatcgcatggacaccgaatcgttggacggcatgtatgtccgtacttccgacggctccatgtcgccgttgagccattttgtccgtcttaccaagaccaacggtccgtcggacctgacccgcttcaatatgttcaatgccatttccatcagcgggtcgccggcaacaggatacagttcgggacaggtattgaaggccataagggaaactgccgaccacgttctcccgtcaggttacacctacgagttgggagggttgtcgcgcgaagaaagcaatacgacgaacaatgccgtgtggatattcgtgctgtgcatggtcttgatatacctcatactgtgtgccctctatgaaagcgtgttcatcccgtttgccgtgttgctgtccgtgccttgcggtttgatgggcagcttcctgttcgcgggactgttcgggctggagaacaacatctacatgcagaccggactgattatgattatcgggctgcttgccaagacagccattctgctgaccgaatatgccggcaagcggcggtcggaaggcatgaccctcgcgcaggcggcatacagtgcggcaaaggttcgcctgcgccccatcctgatgaccgtattgtctatggtgttcggactcgttccgctgatgatggctcatggtgtgggtgccaacggcagccgctcgctcgccacgggcgtaatcggaggtatgatagtaggtacgctggcactgctgttcctcgtaccgtcactgttcatcacatttcaatatattcaagaacggattaaacgtaattaaatgaagaagatcatcttatttaccatatcaaccttgatgcttaccggctgtggcacatacagccggtatcatcgggctgacattccgacagagaagctgtaccggaacatcccggctggcattgatacaacaacgcttgcatccatgtcatggcgggagatgtttaccgaccgtaaacttcagtttttgattgagacaggactccggcagaataccgacctcaatgtggcacgcctgcgagtggaagcggcagaagccgccctgatgacagccagactgtcgtacctcccttcattgggaatcagtgcggaaggcagtggaaacaaatatgacggagctacggcaaaggcgtacaatgtgggagcgtccgcaagttgggagcttgaattattcggcaaacttacggcagcaaagcgtggtgcggttgccgcattgcaaggaagtcgtgactaccggcaggccgtacagacacagcttgtcgctacgatagcggacagttactataccctcgccctgcttgatgcgcaaaaggtgataaatcatcggactttggaaaactggcaggctaccgtgcgcacacttgaagcgttgaaaaaggtgggcaaggcgaatgatgccggtgtgttgcaggcaagggcaaacgtgatgcagctggaatcatcgcaacaggctatatgcaaaagtatctctgagacagaaaacgccttgtcggcgatacttgccatgccgtcgcactcgattgagcggagcgatttggcagaagcgtctttccccgatacaatctctgtcggagttcctttgctgttattatccaatcgtcctgatgttcgtcgggctgaaatggaactggctcaagcgttctacgccaccaatgtagcccgctcggccttctaccccaatatcactctttcgggtacattgggctggaccaacaatggaggcggggtaatcaccaatcccggacagtggctgttcaatgcaatcgcttcgctgacacagccgttattcaaccgtggaacaaatatcgctaatttgaaaattgctcaaacccgtcaggaagaagccagattgttataccaacagtcattactgaacgcggggaaagaggtgaatgatgccttaaccgcatggcagacggcaaaatcgcaatttgaaataaacacccatcaggttgaaaccttgcgtgaagctgtgcgaaagacggaactgttgatgcgccattccggtaccacctatctggaaatattaactacccaacagtcactccttgaagcagagacaaaccggttgcaaaccagctttgaccgcatacagagtattatcaaactttatcatgcactgggaggtggaatataaattagaatcgggtatcgaaaataccttttgacattgattacggaatcagaattgcaatggaagttattagtgggacatggaaaagttgtatcatttttgagctaagcgatggggctaaatgtccgagcaaattacacaaattgtttcctgaagccaatgctcgtgttataaatcagcaattaaagaaattggaaatgtatggaatcatagagaagaaaatatttgcggaacttcccccacattccgaatactcgattactccgataggtgaaacccttttgcctatcattgagaaactggaagagtggggcaatttctttcgtcccaatatggaaaaaatattaggaatgtcagcagacaaaatgtaattcattcctttgcttatatattacacagtaataaattgcataaatacatgaaaacaagatatttcgagaagacattgaaacaggtgaacggcaggtgcaaagctcccgtggcagagaaaactgccggttgtacaggtatgtcggaataaccttatcccaatgaatatggaagcaaagctctggttcatggttttgtgcggccttgcagtcctgctgtcgtatcttgccggtttctggcgacggaagactgcagctgctgcgttcgcagcagcacgagcagccgctaccgccaaagagcgcgaccgttattgccgtctggcggtactggcgggccatcgggaagcctgcctcatgttctgtttcgcccgttcggactttttcgaggaccatcagccgctcaagccgttcaaatcgcacggaataaaagtcgctttctatgggtattactatccttcacggtacgccgacctgatcgacgatgaacagcgggcgttctgctgttccctctaccagttcaaagagggcgaaaatcacggtatcgagttttttaaggcgtgcatgtccgtcttgaatttggccgatgccccttaccacatcctgtttatgccgtgcagcgacgagttcaagtatgcccggcgattcaaacggctcgactggtacatcacaacccaccggccggacctaagttcgggcttatatgatgtcgatgtgttcgagtcacgcgacagcttgcacgaggcgaaaggcggcgaaaaccgtatcctcgaaaggaactaccgtatcacggggaatatcgaagggaaacagattatcatcgtggacgacgtgctgacaagcggacagagtatggccgactacaaggaggagatagaaaggtgcggcggcaaggtggtggcggccatcttctatggaaaaaccgttacccggccgcctctgcttctgataaaggcgcacgtgtggggtggctgcatcgtgaacaaaatcaaggaactgacgaaatgaaagaatgactattgttgaaattcgtttgaacatcatcgggaaaaagccttatcctttttatcaaggggtggtagaaaggggacttgaacacttggaaacggttttggaacattggaaaaagaatatatgacatggaaataaaacttattacttctaacaagaaacaattcttggatttgctgttgttggcagatgaacaagaaagcatgatagacaaatatctggaacgaggtgagatgtttgccctctatgatgacggtctgaaggctatctctgtagtgacgtgtgaaggagagggtatttacgaaataaaaaacatagccgtttgtccctcctcccaacgcaaaggatacggaaaacggctggttgattatctctttggatactatcagggcagatgttccgtcatgcttgtcggtacgggagatacgccatctacactctctttctacgaacattgcggctttcgtatctcacaccgactgaaaaatttcttcacggataattacgatcatccgatttatgaggatggaaagctgcttaccgacatggtgtacttgcggaaagatttctcttaattcatattttgaatggaatctcatttttcacatcatttattataagtgatttgtgattattgaattatatctctatttttggaaacgtaattttaattttcccgaaaaaccaagaataatagggacaagtatttttagtcattacattaaaacattataatttatgaagaaaatcgtattgacttgtgtcctcgttttttcagcctgctgtgtgaccctgtttgcacaaaaggacaaaaaagaaaaggaaacagtgaaaatagaatgttgttgcgaggactgtacctgccgcaagtgtaaatgcgatacggactgctcggaatgcagaggttgtcgcaagaatgaagaatgcagaagttgcgtagattgtgatcatgaaggtcgttgctgcgattatcatcgtcatcacaagaaacacagaagaggcggatgttgcggaggatgttaaacaatcgctgccccaaattataaaaagtgaggttgttcacttcaaaccggcacaacctcactttttatgcgcaaagaggcgatgtctccgtatgcggtcattccaaccaatggaatcttgaacaaagcctcccaaattttcaactggcaatccgtttctttcaaatgccgttttatctctccggtcctgcatgaaaataaacagggcgttctgccgtatgccatcgcattttgtgtagaaccgggtgtgctcaatctccaagagactttcttaaaaacaagtttcattacttgtttccttttctcaccctatatcctgtccacagacaccatacgcatcctcctcccacgaggaagacaaacacgtaagtagccacgctgcctatgaacacccgtccgctgtgtacttccaaagcgaagttccaaagcgacatgggttgtgtggagagttcgccgggctgggcaagtgcatccgttccctcgtaatattccaccacgcattcctttcccttgaaatccgcactgtaacccgaaacggcaaacttgccgaaaggaggaccggctgtatcttcggcttcttctcccgtgaagtagtccgttacccagccctgctgtctgtcccaaacgaacaggccgctgaacgaaccggccagccagttcccctgcttatccttttgccagacattcagccccatgacactgaccgggggagcttcctccaccttcacgggaacggcatccggtgaagccagcgaataaaaaccttcggaagtggagagcagccagtcaccgcacatatcgtcatagcgcaccatgcgcagcttgtcgtgccaaggattagggctgtctaaggatgtgccgggcagagcgggtgtcttagtcagagccaacggtatcatgacgggtggacggagacaccagcccgtaacggccaccaagagggtcagtatgatagtggtgcgtcccagcttgtcgtgccacagcagggagaggcgtgtccatcgggcttcgccttccgtgtgccgcccgtggcggtggcggcggcgcatgtccttgggcagcagccagtaggcaagccccgtgaggcacaggagaaccagcacaacagccaccgcatccacaaccagcttgcctgccgtgccgaacaactccccgctatgcaacatccacaccgtgcggaaaagcgtcaccttcggctcgtaaccgtcgggaactttcacctgtattttccgaaatccggcgtgagaagacgtggagagatagaggtacgaacgtccggcaactaccagcgtgtcgccccggacggtgatgtccgaaagacgttctccctcgtccaaaggcagggggatttctatccaagccgttccgtcgtggcggtacaggccgaactggccggcggcatacagcgtaccgtcgggtgtttgcactatgcctttcatgctacggtagtccgccccttgggaaagtccttcgttgaagtccgcaaaagccgaggcggcagtgtccgtgcgccataccccggctgcaccataggccagtatatgagccacggaatccttgtccgtatagcgcagcgttcccctcagcagcccgccgttccatgcttcgaaacgataacccgcaggcagccacttccggctgacgttgatgtcggccaccgcttcacgatgattcagcacaataccgctccaacagaacatgagcatgaagaagcagaacagcaacccgaaccatttatgatgtttcctccaagttatccgtttcatgatttatcttttattgtcgttttacatccgcagttttctttcgtctgtcacaagcgagataaagcccggttactgcaaacgaaaccagaatcaacgcgatttcctgcacatgtccttgtggatttgcccatagcccgttcagcaggtgaatccggtcgaagacctctaccgcgatccagaagataattacggtggcgaaaccgaaacgcaggctcatgccccacgaagcataacgcaacagcttggcgaacatgaacagcgaaccgatgaagcccagcatcccgacaagcaatgtcaccggatgatggtcgccaaaaaaacgctcatcgtagcagaacatcagcaccaagtagcacgtccacagcatggtaatgacttccataaaagcgacaatgctggtatggcgtgtcatggggcgtgcggcgatttccttcttgtgcttgccgaagaacaagcgctgccaccagttcaggaaattgcagccgttggcagtgcagaacaggtacagcatcatcgtcatggcccagaacccgaatgtggacggaagtatcaggtattccggccggctgacaatctcgcccgttaccgggtcgagctgcgcctgcgtgccgaaacggttggcatagtacataaacaggaagtcgatggcgcccatccagtaaaacataccgccgaacaaacccaacagcgcttgtttgacgtcgccttttatgaatacaccgataatgaccatcagcaaaccgaacagccccattcccataccggcatagaactgttccacccccgccgtaccgtctttcagcgcacgtgccaggatgtgtgtcagcggcatggcaaccaatgtcacagcgatggagacaaacgctttaagccagtgcctttttctctcttttgttgctgccatatccggttttctttattgggaaacggcattctttttcttcgcacccatataccacaggtaaacagccagtacaaggaacgctgccagtatgataatcatttccgtcttatgccccatagggtctacccatatctcgctcaacaaatccatacggccaaggatctcaatcggtgtccagaacacgataacggtagcgattgccatacggatgttggccccccacgcagaaaggcgcaactgtttggcgaagataaagaacgagccgataaagcatccgacccccaccaacagtgtcaccggatgattctcgcccaggaatacatcatcgtagcagaacatcagcaacaggtaggaagtccacagcaacatcatcagttccatgaatgtgacgatactcgtgtggcgcgtcatggggcgggcggcgatgtcgttcttcttaccacggaagagcaaccgttgccaccagttgatgaagttgcatccgttctttgtactgaacaggtacattaccataatcatcatccaaaaaccgaacgaggcgggcagtatgagatattcgggacgggttacgatttcacccgtcacagggtcgagttccggctgcgtgccgaaacggttggcaaaatacatgaagagaaattccacccagcctgtccagaagagcagaccgccgaagaatccccagagtgtttggcgcgtatctcctttggcgaatacgccgacaatcaccatcgccatacctaccgcgcccatgacaaaggccgaatagtgcagaacggtctcgctcatcagatgctccatgataatcatcagcccgtgccccaaaggcatggtaaacaataccatgaggaaagaagcgatggctttccaccaatagcgccgtttggcggcaggaggtgttacatttgttgtttcagtggtcgttacgttagtcttttccatattccattaatttacgtttgatacgtttcttgtagaatactataataattgccgcagcaaccagcatggcggcgtgcagcgtaattgtaaactcccaagtgggagcattggggctgtccccgtacttgtctgccatgacgaagtgggcgaccgttatcgccgtcaggaagacgataactgtcggccatttcacccaccgccggttgcagaagcgcataaagcgcacgaattgtcccatcatactttccgtcatttcaattcgtcgcaatagtaactgattctcccgccttcatcaccgatttccacgttggcatcgtaccaactgataatctgtatcttgaagtacctctctccgtcggcggtacgcaccacatacgtgtggaacgaaggggtgtatgtggggggaggcccggagaagctcatggcctgcgacagcagcgggttggcattggtctcggtcgtggcaggaccgttgttggggtcgaaccacgggttggcatcgaagtccagattgttttccacaaggtaatggttccagtcgttctgcgacatggtgacgcgcacgtcgtccgtgtcaacgacccattccaagtcggaaggcagttgtgaaacgctcgtccagtcatcgtaaccgccatagcccaagtcggcggcaccgccctgaccgatgccgctcgtacccgaattggtacgcatggtatagccgcagaaagccagatcccagtccgtgcggttgatttgttcgccttccttgatgtccttgttcacggtgtaagtgttgaatgactctcccgtgcggaggttgaagtatatccagtcgttcgtcacccctgtggaatagcccgacttgcggggcagcgtcttgcccgtaaagggctgtatgtcgtcatagtccacgcaggagaacatcgtgagacagcccagcaggaggcttaccgttttgaataatcccatacgtttcattgtcgtatatttaatcatttctttttccttaaagagttaatcacatcgtccagcataaattccaactgcacccatccgcgtgttcccggcgtggcgggcacgttgaacatcgtgatgcccgaaccgagggttttcggcacgtagttgaagatgttgtccacaccgagcgtcagttttaccttattgtagaaggtctgcgacaccgacaggttgcacagcacgtattgcggcaggtcgcaacggaagtaggcgtcatagctcttgttgtcctcttccacgaacacgcggtcctgcacgtcgaacttcttgcgtcccatgtacgaggcgctgaacacggcgttcaaccggtagttcttcttcgtgaacttgtagtccagactggccgtggcggcatggggagaggtggtgttcacctgtatgccctcgttcttgctcacgttcacgaagctgtacgtcccgttcagcgtcaggcagtccagcacgtgccagcgcagcaaggcttccagccccagaaggcgttgcttgctcaaattggtgtactcgaagttgtactgcatgtcgtagatgcgccatacgccctcgattttatcacggaaatagttgccgtaggccgtaccggacaggaacaggcggtcgttgctgtactcggctcccagcgagaaataattgttcttttccggttgcatgttctcgtttccgcggatcatgaacatgcccaaatggtcccagttgaagaagagttccttgatactcggagaacggtatcccatcgaatagttggcgcggatgctccaccgttcgttgggcgaatacttggcggcaatcttgggcatccccatgaaaccgaacgccttcgagaagttggtacgcagtccggcagataccatccacttggggttgatggtccactcgtcctgcaagaaatactccgtttctttcaaggcgcgggttttcagatcgtggttggcattgccggagaaacggtcggaggtcagttcgtccgacgtatgttccacaccgaagatcaggctgtgcccgtcgaagtagttgctcgtgatggtcaggcgcggctgccagatgctactctcgtagtccttgttgcgcgtgtcgatgcgctcgtgccgcttgaagcggtcgtaaaagtcggcatgaaggctacccgtaacgctgaaccagtccttcacgtggtaggtcagcttggctcccgccgtccagtcacgcgcctggctgaaagtcatgtcctgtatcaggtcatacgtgttcatgaagaaggtgctcccgtaaaccaagaccgagaggtcatcggtcgggtcgtaatacagtttttgggaaaccgtgatatgctccttgccctcgatgcccatcggcggacgtgaggacgagttgaccacggtgatgtcgtgcggaaggaagggattggcctcttgcgtgtagaccttcttgtcattctccgcctgatacatgtagaacgcatccgaggaactgtaccatgcgtcggtctgcgaggttactttccccgccttgaatccggcagatacccagccttgcaggttggggcggtcggcattcttctcgaacatatacaaaaaatccttcggttgcggattcttgtaattgcgctcgttcatctgtccgtagcgcacacctgcgtcgatggaaagcggtttggtcgttttcttcgtgataaggttgattaccgcaccggcggcacgcgagccgtacagcgtactgctggctccttttacaatctcgatacggtcgatggcgtgcaggttgaaacgctcgtagtcgagattcccggccatgtcgcccgtcatgcgctcgccgtccatcaggaacagcacgtggcgggcgtcgagcccctgcatggagatttcgtttccgaagcccaccttctggatattcagaccgggagtttcctgctgcaatgcctgttgcaggttgctgtatccggcttcgaccaactgcttgccgcccaagacttgcgtcgtaacgggcgacatcttgatgggtcgcgctgtacgcgaaccggtgacgactacctcgttcagtcccaaatgatcctcttccagatagacggtcttctcggtttcggtcgcttctatctttcctgttgccggaacaaaaccgacataggatattttgtaataatacgttttcttggaggggattttcagttccgccagcccgtccacattcgtgacgctcccctgcaggttttgcaacgcttcgttatcggcatagaccacagtggccgcgatgaccggctgttccgtccctttctccagaactttgagctttactttacgttgtgcctgggcattcatacatgccagtaagacacaaaataagatggctgttattcttttcatctgtctatcatcaaaacatgttattctacacaaaaaagagggaaagccgtgtgtcttacggtctttccttctttcctgcaatcgaaaggtcaagccttgccctgttctttcttggcttcttccaagtctttttcgtactgggcaaattcttcttcaaagcggtcgatacggctcttgtcgatttcttgcaggaaggtttcggtgcgcacgttcatcatgttgtagtccacgatgaactccacttgcttggtgtccacgttcaggaaaccatctacacgggcgccgctcccttcctggttgtccgcagcgtcatcgccgctcgtggtgacatttccgtccgttcccacgaacttcacccaaccgctgccggggtattcatccttttcccaactgttgagttgcataaacttcgttgcacagcggaaggtgatggcgaagggcatggcgcccacggtgaagtcgctcaggtcgagcaccatcgtgccgtcttcccgccaagaaaagttgaatttggtggggcaaccgctttccaacagcgtcttgtccacaccgctcattgtagcacgggttgagagcacgaggtctcctacaaggatttccttcgccttatcaatatattcctgtgcaggtggctcattggtaagtgaatcgtcactttcacacgaacttaatccgattactgttgccataagaaggctgaataaaaagtataactttttcattttgcttatataatttacttgttttgtaatccataattgtttcctgttcattacccttgcctgcgtgtattccgcaaagggtatgtaaagtcatggtttttacatgattaaaggcaggctttttccgatggcaaagtctgtctttgatgtgtaccgcatgtaggcttcagaagcggttcaggcggtttggataattttgtttcctcgccgtcggttgcataccggaagtgtttttagcggcatagcagccttgctgacaggataatggtgtcttccccattgggtgaggtgaatatattgtgataattttttcttagtaacacacaaaaaaagagctaagagaaagccgtttgacagctttctccttactctttctgaatttaatttcgttgcttgacaaaataatgacgaattattttgttccaacaaagtgtacggatgcagggaaatctgcacctaagaacttaccggatactgccagagtaaactcgatagtgttgcctgtaactttggcatcagtcaaagaatctaacttcaatgttactaaatccatgcctaaaatggtcaaagttcctgctttatcacctttgaaagctgtaatttcaccggtttcttcatctacttctacttccaactcgatagtgatattccccggcatacttccgatctgcggaaaatcgcaactcaaaataccattttcaagagtataagatgcagcacgtggctcataatcttctcctctcattttgatttgatccattgtaccgttataagtaccttcgtaatcgctgattgccaatacggtacttacaccatctacatccatcactgtggcagcgtcagcagactgtgccattccgaaacttgctgcaacaagggcagctcctaagaaaaattttcgcatcgtttttataattaaagtttaataaaaaaataattacactttatttttgtttgttcaataaagtcctccaacggcatcctttgtttttatcatacgataaagaagaagtataacctaaccttctgaccgtatcgtctgggtcaatgtctgtataatttgctttcaggaatgcttgggttgattctctatagaaagtgttctctgaacaagcgaaataagtaccggcatatccatcttcactatagaaaatggtcagttccggataaaccagattaaagtctttattcaaatcacctatactgagttctgctaccatcttgacattcgacatgtcaaatgtttccaatgcgtccaagcattcaatatcaattctgtaggctttcaattcatttttttcgggcaatttgatttctttcagtataggacatcccagaaccatcagactactgccatacgtaccattgccttccgtttctttatctccttgaccccaaatagtggaataactcaaatctaacttctgcaatgccgggttattttggacccaagcacttcgcaaatctgtagcattggataagtcgatatcttccacttctatattttgcaggatgacttgggttatgaatttccctacttttatattgggcatagaagctatactttcttctccggcagaataaaggctgattttagcaccttcccaataaggattctccaccagaaactgaataccctcaaagttggtaacattatcagcaggagcaacaagcagttcctttgttttctggtcgagtcccaaatgtttgctaaggtctatttggtcgccgttaaacagatcggcaaaatttgtctgcaaataagtgagcaggtttgcgtcgggcacgtcgcgcagggtggtataagtttgcagattgccgtcgacatcagtcatcttcatatcaatggtgccggcggtgatggcttccttgttttggcggtagaaacgcacgagatcttcgatattctctttagcggtttccggaaggtaaagtttggtaatttcgtgcaggttagtcacagtttcatcaccgttttcttccactacgacactcacaagattatcatagtcgtagatttcattacccgtcaggtctattccggtgatttgttccggcaatttggcaaagtcgaacgccgggccgtaaccattgtccgacagatccacatcagtcaagttagggaacatggaaagttctgccagtgcgtctgtggaaatctgcgttccggagaggtcaagcgtcgtcgtattgttagccaaatcatcaagcaacagattgccgtcctcgttgaatgtgtagcctctttgaacaagaatggttttcaattcggtattctgcacggcacccgtgctgtatgagagggtgttgtcgtcatcgctgcacgatgcccctatcagcagcattgcgaatgccatcaaaccgacatgcaaattgtttcttttcatctttctgtgattttattatttcgttattattatttcggggtgcaaaattataacgagtttactcagagcacaatacctaaaaattggtatataattagaagcaaatcaccactcattaactaaaaaaatataaacttcgctcctgctttataattgtttgttaaaacggtacttgaaggagagcatgaaccaactacctatctgctgcgtgtgtctctccgacaatccggaggaagagacgctgcgggtaaagttctttttctggctaaggatgtccgcccagtagaatgacagttccgccttcttctgtttgaggaaacgccaagaaagggaggcgttccacactacctggtcatcttcgccgggggtgatgttcgtcccgttgcggaaagaataatcgacatcgctccgcaactgaatgccgccgggcaggtcggcgtaggcgttcacccccaagcggtagtcgcgggtgtaatcgccggtttcgcgcaaaaggttggtggagtggcggaaacgccagtcacccgtcaggtcgaaacctccccattggggctggtagccaaaacgcaggttggcattcagtgtcgtgttgtgggtcgtactgcgctccggcatctcctgctgtccctcgttgataaggcttacgttctggctgaacgaagcgccggtacgtgcggtaacggaaaatcggcgtttgatgcgcttctggtatcgcacggtggctcttgcgttccaattcccgttcacattcacgggatagctttctataccgcctgtttgggtattgtacgtcacagcccgtgtcacactgttcaccgtgttcgcccaagtcatgtctccgttcaaacctatcttcgtgtctcgtgcttctaagcgcaccctttggttgtacgaagggcgcaggctgggatttccccgtgtaatgttcagcggatcgctgttgtcggtcagtgtcagcagttcggtcagtcccggctgtttcgtgtctccctcgtaacttagttgcacccgtgttttctttttgtgccacaagacggtaacagccgggtagtagttcacggaggttctcagcgtgtcggcttgcatccgcccggtcttctggtcgagactctgccgttcgggaacgacggacaggccagcgttgatttcccaagttctgtccgtatagttaaggtggagggccacttcatgcgctgtcgtgtggcttcggcttctgttgctcaggctgtcggtataggctgcctcgtagccttccggcagggtgtacaagggttcatcgtccgtaccgtcgaaaaagcgggacaggtcgtaggtattgcggtcgttgttttggttttcccgtctgaatttatacgaaagttgtgcccgcaggctcttgtgtagtggctgtgtcagtatcagtcccaagctgaatttgcggtttctgtttgggctgtcataatattgattacggtagaggacggaatcgttaccccactcatcctgcaattggtaataggtggtggaggacacggaaaacgcctcgttctttcctctcccctccgagtattgcatggttagccccaaactgctgcctttctcgttcagccgtcgggtgaggtcggcgttcaggaaatactgccggttggcgcttgttgaacgggagttcatgcggatgccattcacccggatatcgttttccgtttggccgttttcttccccattgaacggtgctgtgatatccaattctggattttcattgtaggtcgcctgccggctgtcactcccgtttgtccctttcatcgcactaaagctgcctgaaaggttcagcaaggtcatcttatcgatattccatttcatgcttagcatggtgcttgccatgcggttggtgttgtggcggtcgctggtcgcatagcggtagcggttccccgttttcaggtattgctcgtagtaagatgtcccctcgttcccattgatagcattgctgtacatgacattcccgttaaggtgtatcttctttccgaactttttcaggaagttcaccgctacattgtcttggcggttgtctttgtttgcggatgtcatgttgcggttgccgcttttggcgattaccgacaggttttccccgccggttttgaagaaattgctgattagttccgcttcttttttcttgttgttacccttgcctgcggctacggaagtcatcagtgtaccgttgaactccttcttggtttgcaggtcgagcacatagttttcttcccctgtttttatccccatgaatttctccatttcgctacgcttgtcatacacttttatcctgcttaccaaatcggcgggcagattttccaaagccagcgcatggtttcctgcaaagaacgcttccccgttaacattgatttccgcaatgggaagcccattataaaccaaggttttgttttgcctgtcatattccaagcccggtatcttttttaccagctcttccaagttcgagccttcgggaatccggtaggcatcggcattgatgacggtagtgtcgcccaccagttccacctcctttatgggagccgtgaccaccacttcggacagttcaagaccttctgtcaagacaatgtttccgacatggattttcgtcttgcctgtatttaatgcacgaaactccggcttcatacctatataagaaactttcagcaggtaaggcgattctttctttgcatggaagctaagacggaaattcccgccggcatcactcatcaccccttttacaagggtggaatccccggcttcgagtaccaagatattggtatagggcaacacctcttgtccttctccattgttggaaacgacaagggtctttccggtcacatccaccctctgttgggcaaatagagttatcggaaacaggaacataagtatcagtccgagaacagatatacgcacaattacccgttatttttttatagtttttaaaagaaatgaaaaacgggtacaaaattacaagcttttaccagccgtgccaataccaaacaatcggtatatataataactcattactttaaccttcaacatataaaaaatggtcggaacgatacagagtacaagaaaacctgccgtacaaccgggtcttttccagagcatggcgtcatgtatgaaccggacatttgtcgtgcaaatgaaagccttccaaagaaacaaaccccagtccacaataaaaacaaatccggcaaccgttcttttatagaaccggctgccggacgagccaaattgcggaaactgttaccgtttcccttccagaatcagaatcggccgacccgcaaagcattcacgaaagcgctggcctcttctcccgtataatggagtacggaagatgccggttcgtaagcgtaaggaacatacttcagcaactggacggcagcgaagttaccgtcctgcgaaaccatgtagtccatccgcacaccgccgtccttcttcggcagtacctctgccttgccgtcaaaagtcttctcctccagcaaccgccccaatacagagaggtcgcccgcatcgaagaaacaagaaccttttttcaccaaactgccggtcggaacgtatatcagactcctttttcttatcatcaggcgaatacctccggccaccagaaaggcgattccgccgaccagcaggacaggacctgacgcggaagaggaatcttccactttcgacgagaaaaacagaaggcacagtcccaccgcacaaaaaaggagggaaagaataagagccgaaatattggtaatcttctttatatcgggatgcgctgcggaaaacagggtttcggcagcagaaatgttttgattcatacggattgaaaattttatttttgctgattgttcaataataagatatactcacgacgaacagccacaccccgcttttcagccaagtgtaaccgtcagtataaacgataaaaaaacaaaccgctaaatcagaatccgtctcatcccgaagatataatgctcgcaggcattatcccagttcgggctacgggaagagtcatgcacgagggtacaacaataggtcaggttgttcatgcggcaaatgagataccgctgtaaaattcggagaaaatgggccgtttccacagatatgtaccgaagatgcatcccctttaccgatgcgccggcacggcaagccacatcggggatttccccgattatgcctgttatgtcgctgtcctttttttgccggatagagtctctgtcatggaattgctgaaaagaggcgttgtccgtatttcggacacaacattcctgcgcagccgccacaccggccgccggaacatgcagcgccccggaattgcataccaaggccagcagcaccaacgatagaacagcaacgaatcctttcataccttaattttgccttgcaaaggtaagcataaaggcatttttttaccattcccgtgaaatgattaacaaaaataaacggaatcatctgtgttttccacccgcaggacttaatgcgggggcctctctggattcggccagtgccgccacgcactcttcgcgtatggacttgatgtaatccagtaccattaacggatcgacactttttccatcgagcttgcaggaaatatgcaggtgttcgccggtgctgcgtcctgtagaaccggtaataccgacgacatccctcggcccgatagcagcccctttccgggtaaggatacgcgacaggtggcaatagctgaccgtgtagtctccatgccgtaaggtcacatacttgccggaggatttgtcctgcccgactttcactaccactcccgccatcatggccatcacctcgtcgccccgtgcgtggaggtcgattccgttgtgaaacttcttttttccggtaaaaggatctttccgatacccataaagcgagttgattttcatccggtgcagcggatagcttacgctaaggtaacgctctatccatacgtgtttgcaggtgtcggcgggcaatgccggggcggcgtctcctgccgacggtaaggagtcttggacggaaagcatgtttccgggcaaggtcgccacattatccctaccggcagaaacgacttcaaccctgtatcgggacggcacggtcgagaccgtattgaattgtgcttgaacggggcctgcgatacttgcagcacccgccatcaaaaccagtagtttctttctcatgcggcaaatataaccagccctgcccaagatgtcccgtttccacggcctttttcgaccaaagtacaacaaaaaaagcattcagagtatgaatttatgcgcaaaatcatactctgaacataaaaataaactctcttaatacactaatattattctattatatacaagggaatgaaaagaatctatctttgcaaagtgtaattcaaaatacaaaattaaatatgaatgtagtacgatttgaactaattgaattgccctatccgacactggcccgattcgggcttacacaggagatgatcgaggacttgccgatgcgtgtcctcgatgagatttgcgacggcagacactctcccgtgcttccggtccgtgtccgtgacgagaagggagaactaatcgaaagccgcagccgcttcgcccttgtccgtagagatgacggtctgtcggacgtggtattttatcccgtcctggaatcctcgccactggaacgctacgacgaggcgcaacagaaacaactgctcgcaggcaaggcgattcttgccgatgtggagacggcagacggacggcacagcaaggcattcgtgcagatagacgaggaaacgaagcaggtgatgtatatccccacgccgattatcgggcgcaacctgcaagtgctggccgacataatgcacctcggtacaatggaggtaaacagtatgcagaacggcgaaccgctgacactggtcgtggacgatgaacccgtcacggtgggcatcgacctgcatgacaagaccggcatccgcttctgttcgggcgacagccagaaatggaaagaacagcccaaacgcgagtgggacaagtacactttcggcgtgtacggctgctgggtgatggacgatgacggcaacctcgactatgttcccgaagaggaatataccgaagaactgtggaacgaacagaagaaaagcgccgagcgtaaccgtgcggcgggagttcacaaataatatcttaacatccagcgaatatggcagaacaccaatattattccgaagaggtacttatcgagaagatggagcgcggcgaatacggctggctcgactatgtgaatcatttctcgcccgaatggcaggaggaatatgcccgctattgcaaggagcacagccttatggcgggcaacgaatccgccgccgagttcgtccactacaaggacgagcaactggaggcggcgatggagaacggagatgcataacggaaaccctttttaacaacggattatggcgatacgaaagaataccaacccccgaatgatggacctgcaacccgaaatgcaggacatattgaggcgtaacggtatgcaggcccacgtggtcagcgacggcacgggctaccggctcgtggtgcagggccacgattcgccgctgctgacctacgaccttaccgagcgtcagatgttggccctgacggactggggaacaaactcggccaacaagaaagcctacaacgtgttcacgagcattgtagggaaagacttttatatgcccaagaacttcgtccatgcccgcaatgccaacggccgtgtcgctatggggctgcacggctaccgtatcggtatcggcgaatacgggcatgtgggacggttgggtatgccgcccccgtttctcggctggacgccacgccaccagtggggcttccatctgcggcgggtcggcggccaactgttctatccgggaccgcccattgtccctgaacggtgggacggacgcatgaagccgggcgaattgcagtcgggcggctacggcttctattacaaatacaaggccggacaaccggtgcaaccggcacaacaggccgacgtcctgcaaaacctgcagacggtcatcacgccgctggtcagccgtccgcgcagcacggaaccggcccgtacctacaaggaactgataagctctcctgtctatttttccaacgagaaatggcaggaatgtcttgcctcccacggccttatcgtcgataaggaggcacggacactgaccgtacagtccgaaaaggtgaccgccgatctggtctatgacctgacggaagaagaaacggccgtcctgacctccaactccatcgaggaacaaccggtcgagaagcggctggaagtcctgaacggggttatcggggcggattttgccgacaaggtaacgatggcggacctcgacagcaaacaacgtatcgcccttggtctgcaccccgaagtacaggaggaactgacgcagcgtcagcaacaggagcaggaaatcctctccccactggaaaaccagctccggcaggagatgccgtatggtgcggctgcttccgtcgatggacgggatatttccgtccttgacgagcgcaagggctggtaccgagaagaacggcacggcagggaggtcgaggtcggcgagatagccgtacacccgtcccccatagagggcaagtacaagatgacggccgtcatcgacgggcaggtcatcagccacgagatcagccagaaggattacgacaaattccttgcggtcgatgactaccaccgcatgaaaatcttttcgaaaatattcagcgaggtggacatgaagatgcggccggaagcacagcgcagtctcggcgtgaagattttcgccgcccttgcggcaggaacggtcgtcacggcgggtgtcgtccacggcctgcggcatcatcatcacggtccggagttctacggtgagcgtttcggaggcgagccgcgtccgtatttcaagcccggtgtcgatacgccgagggacgtggctatacgcaatttcgaggcacagatgaatcaggatattaacgatatgagaagagggagataaagacaattatgagagaaggagaccttacctacgacgacttcctgcaaaggctgaacattcaggacgtgctgattgacgcgggctaccacctgaaccggcgcgacggcctgcgctatccctcgtatgtccgtctggacagcgagggacggcgtatccgtggcgacaagttcatcgtgacgcaacagggaaagtgctgcttccaagcacagcagcagaaagtctataacatcatctcgttcatcaaggcgcacccgcagtttttcgctgaataccgtgcgggcatgtctcccgaccgactggtgaacctcgtgtgcaaccggctgctgaaccatcccatcgaggaccggacaacgcggattatacagcccaagcgggacatccgcccgttcgacatcgcgaactacgacctgtacaagttcaacccgcaggaccgggagacacagaagaagttctatccttatttcaagagccggggtatcgacctctacacccagtacgccttccaccgccacttctgtctggcgacgaaacaccgtgaggacggtgcggcatacaccaatctcgcttttccgctgaccttgcccaaaggcgacggcacggtcgtgggcttcgaggaacggggacgtgcaagaatggacggaagcggcagctacaaaggcaaggccgagggcagcaattcgagcgaggggctgtggattgccagccctgcccaaaccccacttgcggaagctaagcgtatctattggttcgagagtgcctacgacgcgatggcttattaccagcttaaccagaaatgggacaaggaactgcgaaagggagtgttcgtttctaccggcggggcaccgagccaacagcagttcaaagccatgataaaggccactccacgcgcttaccaccatctctgcttcgaccaggaccgtgccggacagatcttcgccatcaacttcgcgctcacccaggcgggcaagacattcaccagcaacgtgacgaaagacgacaaactgctggtccgtatcagtggcgaggagaaccagaactacgaaataaaactcgaacccttcgactttcacaggataatcggcacgcttttacgtcccaaagaaatctatcgggaagatggtacgctcgactatcggacaatcggcgacggatatttgcaggagatgagcatggtgtgccaagacgagtacgagatagcccttgccgagggttcggccagtgaggaaacactggagggcatgagacaaaatatcatggccatagaggatgcgatccgtaatcttcccgctcccggcgaggacagcaccgaccttattgtgtacgagcccgctgaaaaaggctataaggactggaacgaacagctcttggcaaagatcaggctgcaagaatcagttcacgaagagccggccagaagagaagaacccgaacaggaacggcaagcacgtttccaccgatgacaacgcagtaccccctacatgaaacaacaaaagaaaagagaagacaatgaatgacaagaaattgacacataatgattttttgcaaagactcgatatccgggatgtactgcttgatgccgggtatcgccagaaccgacgcttcggactacgcctctcctcgtttatccgcacggacagtgaggaaaagcgtatccggggtgacaagttcgtcataacgcaacagggaaaatgctgttgccaaccaccccggcagaaggaatacaacgtcgtttcgttcatcaaggagcacccggcgttattcgcggaatattatgagggaatagacctgaaccggctggtaaacctcgtgtgcagccgcctgctgaacatccccttcgaagaatacgaggtgcaaaccgtaccggtcaagcaagacctacgaccattcgatataacagactacgacctgcacagattcaaccctcaagaccatgagatgcaggagatattctatccctatttcaagaaccggggtatcgacctcagcacgcagaatgctttccaccgtcatttctgcctggcaacaaaacacggcgcagacggtgcggcatacacctgtctcgcttttccactgaccttgcccaaagagggcggtacggtcgtgggtttcgaggaacgggaacgtatgagaatggacggatgcgatagctataaaggcaagagcgaggaaagcaatgagagcgaagggttgtggattgcaagtcctgccggaacacctcttgccgaggccaaacatatctactggttcgggagtacctatgacgcgatggcctattaccaactccatcaggcgaagaacaaggatttgagaaaggcggtctttatctcaacgggcggcaagcctatcgggaaacagatgagagagatacttgatcttaccatccctgcccggcaacatatctgtttcgataatacccggaaagggtcgaatctcacatgggatttgcaaaaggagatatgccgctcagtacgttttgccatagaggaaacgccggagaggaaaccctatctcgattccataccggacggcggggatttgacagacggagaattttacctattgcccaagggtggtttgcaagaaatctgcatacggttcgacgccgaatcggaagaagcggagtcgatgcgttcgagcgggttgtgtgccccggaagacgtgcaggaccagatagataccacgaacaagtgctaccgggaatatcgagagaaactacgggagttccttggtattgacagggagcatgatgtctccattacctgggaaagtccggattatcgccatacgagctggaacgaacagcttttggctgaacagaaacgtgaagagactgtcgggcaggagtcggaaaaagaagaaaacgccgggcaggaacgacagatacactttcgccgatgaccatgccatataccatacaagatgtccggaacattatcctgcgcccgcacgccgggcaattcgtcatcgacgaactgccattgatattcatgtgcatggcgggactggtgtacggcggcatggaaggtatgccgcttggcggtatggcgacggtcattgccttgtttctgttcctcgtgctgctgtatcgtttcatttgcctgcgccggatatgttaccgggtcggcaacgaacagcttgtctgcgagcggggacttttctgccgcagggtggactacatggaactgtaccgtatcgtggactttcaggaacaccagagcctcctgcaacagctttgcggtctgaaaacggtcgttatcctttcgacggaccggaacagcccgaagctcgaccttatcggtatccggcgcggaaacgacatcgtggcgattatccgtgaacgtgtggaaatcaataaacgaaaaaagggaatctatgagattacgaatcattagcatatgggtggtctttgtgcttgccggtctgcttccgcaattggccaaggcgcaggttgccgcttcgaacccgttggaatgggcagccttggccgagggaaacgaactgataaacggccagatagacaaacaaatcaaggggcagacacagaccgccctgatgcagaacagtatcgcagcggagttcaaccgcatacatgagtgggaaaagcagtacaacagttacctcaagacggcgaacggttatgcttcgtcgctgaaagcctgtacccacctctataacgacggcgtgcggattttcctcacgctgggaaaactgggcaaagccatcggggacaacccgcagggcatcgtcgccagcatgaacatgaacaacctctatatcgagacggcgacggagctggtttccgtgttcacgttgctgaacgacgccgtggccaaaggcggcacggaaaacatgctcacgggggcggaacggagcaaaaccctgtgggctttgaacgaccagctcgcggcattcagccggaaactgcatctgctctatttgagcctgcgctattataccctgaacgacgtgtggaacaacataacggcgggtatgatagaccgcagcaacggcgaggtggcccgtctggccatgtcccgctggcgcagggcggcagccatcgcccgttgaaaaaaggataataaaaaacgaagaacgatgaagcggataatctcgatatggattctgttgctgtgcgccggtatctcgaaggtacaggcgcagaacgatgcgacccttgcgggaatgattctggtttataccaacaaggccgagaaggaactgaaaaaccaagagaaggtcatgctgatgcaaactacagggcatgtgtggacgaaggaagaagtggaaggcacgacggacttgcaacgggagttcaacaattacctgaactcgttccgctcgattgtctgctatgcggctcagatttacggtttttaccatgaaatatcgcagcttacagacaacatgggcgacttcaccaaacaattgagcagacattcgacgggtgcattggccgtcgccctctccacgcggcgcaaccagatttaccgggagatgatattgaacagcgtggaaatcgtgaacgatatacgcacggcctgcctctcggacaacaagatgacggaaagggaacgtatggagatcgtgttcggcatacgtccgaaactccggtcgatgaaccggacgctgcagcgactgaccaaggcagtgaaatacaccacgatgggcgacatctggcgggaaatcgacgagggcgcacgccctgtcgcggacaagtacgacatcgtgaaagccgcccaaagacgctggcggcaaattggaagaaatgtaagaccctaaaaaaaagaataaaaatatgggagcttgggatacgatattgaaatacggcggaaaggccatgaaaggcatgggcaaggccgccaatgcgacggggaaaagtgccggtcatgcggtactgcatccctcgcagacccttcggggagccgggcaggcggtcaaaacggctaccgccggagctgccgtcggttatgtgggttgggaaaaactgaccaccgacaaaagtgtcgcacggatcgtcagtgaggccgtagtcggcaaatccgccacggatgcccttgcaggtacgaccgaagacatgaaggaactgaaagacaaagccggagagacggtctctgccataggtgaggctgtgggaggcgcggactcgaaactgaacggggtatcgaacttcctgcgggaagcctccggcggtgggttgttcaacatgctcagcggctttttgcgaaacctcggagggggcaatgtgtcgggattgaacattgcaggacttatcgcagcagcgtacctcgtgttcggacgtttcggctggctgggtaaaatcgccggtctgtttctgggcatgatgcttatcggcaacaatgcgggcgttgtccgcacggttccctcggaaacggtatcgaggacacagacgccgacactctctccggaggaacaaacgcaaagcggaggaatgagaagatagaaacacgaaaatatatatcacaatgaaatatacggaagaaatgattctgcactccgacagcggctattgtatgccgttcgaggagccgcaggggaaagatgtggagatgtcgctcggctacggcgaacaggtacacccggcaacgggagaaaagttctttcatcacggaatagacttcaacgtgaggtgttacatgctgtcagccgtggccagcggcatcgtgtcaggtgtgggcaacgacccggtacatggcatttgccagacggtccgttacggcgggtacgaggtgacatacggtcatctgtcgaatgtattcgcccaattcggacagcgggtgaaagccggacaaacggtggctttgagcggcgaactgctgcatatagaagtcaaattcaagggcgaggaactgaacccaatagagttcctgaccatgttgtacggcaacatcaaggctttgcaggaagccgacggcaatggtgcggcgtctttttacgatgcggaaacaagagtaaaaaacgactacgagaaggatcaaagggaaatagaagagctgatgctccgctttctgccactttacatggaggatttacagcggggagcgtacacggtgcccgcacatacggagcagtcgctgcgccacatctttacaatgggagctgcgaaggagtatttctatgagaagatgccgagcatgtacaacccgctgggactggggcgcaaagccatgccgctggcctgcaaggtacagaacctgctgatagcggatttcctgaactaccttgccctgcggcatgatgtgtacctttccgcaacaggcggcgaggtaaaaaaaaacttcatgacgaagccgtagcgggcagcggactcattgatccgttggcggaactggacatcgacatccagagcttcgacataccgagaatcgtctccgtctatcccgaccgtgccggagtccgctggtggacgaaggcatggttcaacaaccgggaggaaggggaagcctcggtagaaatcgagcgggaacaggcgatacgtttcattcacgacaatatcgaaaaggacacgtggctcgaagagtttttccccaagcaaatggaggtgtaccataacgctatcgagcagacgaaggaacaactgttgaaacaaataaacatgatatagaaagacattgattatatggacggaatcaaacatagcagaaggtttgcggagttggaggccctgatgagcagttatttccgccatcatcttgtccccgtcatgacgcagacgcaatcctacctgaccgaaaaacagggcgaggaaatgaaagcgtattcgacctccctgggcggcatactcggcatgatggcgtcagcggggcaaccgctcgccgacccgtaccagactctcaaggttacgggagagtggaactccaagacgaccgaggactacatcgggatgtgcaaggacaggattctctcgtcggaggagatgcagcacgacctcgcctacatggccggacagtggcgcgatgtcgttgtgaaggaagtcggacgcgagcgttacgataaactgtcgcaggaattgggctgcgacctcgcctatgccttcgtggactatcgtgtagagcaactgatgatagaccaactggtcaaggaacgtatgcccaaatcctcggcggactacatcatccgtaaggcggcagaatcgagcctgctgggattgccacaggctttggggcgctcgccgctggccgaagagatagaaaaacgcggagaggttgcctaccggccgagcaagttggagaaaggtgcgggctgggtgttgggggcttcggccgatacggtcatgttgggcggtacgggttcgtggacggccgttgcacggttcatcggtgcggatacggcaatctcagccgttgccgaccatttcgggaaggaggaaacgcagccgctctctgcagaggagtgtatcagcaagggcgtgttcggcagcgacagcaacgtgttcgacagcttccgcaaagaggcggcaagcataccgggcaaagaaaacacggctcttgccgcagccaacggaaagttgcaaaagaagataccgattgtaacattcgattttatggactggtggaaaacagacaatagaaatatgccgtggcgggaagaaaccgccgaggaggaacggaaacgggtggaacggtataaagacgtgccgatggttgtcgctcccggacaagaggaagcctacctgcaagatatggaaagacggaaagccgaaacggaggaacagacggaatcgaaacccaaacaaagggaaaaagaggaaaaggaagtgtcgacttccgccgtctctgcgggggaagggatgcggcaggaacaggcaggtcagggaacacagaccatacagaccaacgagaacggctgggacgagctggtccgctcgctcggactggacggcataggcgatgtcgcgggtaatctgggctatatactggccatgctgcccgacatcctgctgggcgtgtttacaggtaggacacaatcgctgggcctgaaagacaacctgctgccgatagcgagtatagtggcaggtatgttcgtcaagaatccgatgttgaagatgctgcttatcggcttgggtggcgcgaacctgctgaacaaggcgggacacgaggtgctgggaaaagaacggacggagggaaacagaaatgcagccacgaccggtagagaggtacagtacagacgctatcccgacgagccgctgaatccgcgtatcgtgaacccggcactacaaggctgcacgctggttgccacgatagaccgtgtgccctgtacggtgcagctcacccccgctatggccgacgcttaccgtgcaggagccttgccgctgaacacgctggccaatgccgtgctcgcccaaagcgacaagctccgccagatggcttcgcagaactatgacaacggacagcaggaaaccatcgtgcggacacggggcattcaataatcctgtaaccgataaaaatatgggaatatgaaagaaaaatcgcaaatagaaaagaatgccgaggagcgtcagatagagctgctctccacggctttgaacgaagcgtcgaatgccgggggacactggctcaacgctacgggcaagggctttccgaaattttatccgaaaggtgttgccgtcagcccgttcaacggcctgttcatggccttgcattcggaccggaacgggtgcaagaccaacctgttcaccctttacagcgatgccaaggcacgcggcacatcggtacgcgagcacgagcaaggcgttccgttcctgttctacaactggaacaagtacgtccaccgcaacaatccggaggacatcatcagccgggacgcttatctgaaactggacgaggaggtgcagaaacagtacaagggcatacataacagggagatccgcacacttttcaacatcgaccagacgacactgccctacgtggataaggagacttacgatgcggtattgcagaaagacggtagtgccgtggagcgtggctactccgaaaccgatgaacggagactgcatatccgcttcaacgacttcctgctgaaaatgcgggacaatctcgtgcccgtgcgttcggacggcagcggaatgccccattacgagacggaccgcgatgcggtctatatgccgcgccaacggaacttcgagcattataacgactacgttcaggaagccttgcggcaaatcgtgagcgccacggggcaccaacaacggctggcccgtgaaggcatggtgatgaaaaacggcatgggtccttcggaagatgccctcaaacaggaacggctgatcgtggaggtggcttcgggcatcaaaatgctggaactgggactgcctgcccgtctgtccgacaaaagccttgaattggtagactactggaaccgggaacttaaagagaaccccaacctgatggatgccctcgaaagcgacgtgaacaacgccctcgaagtaatccacaaggcggaacggggcgagaaaatcgaatatgccacgatgcgtaaccgccggcagacttcggatatgcaggagcagttacccaagcatttctacgtggccgatgaaatccggaaacacccgaacaaggaggacaagaccattgtcatcgtcatcgatccgtcctcgaaatcggcggatgtgatactccctgccggtgcgtcgccggaggtggacaacgaagtgccgggcatgaacaaggcccgtatcggcagggctttgcgaagggaaggtattgaaaacgtgcgtttcttcaatcccgacggcgcatgggggtacaggcccgatgatgcctatttcgccaagaaacaggtatcactggcccgactgaagaactgggcactggagatgctttccacactggacgtgacgcctgcggtcaaacgggcggacgaaatcggtttcgaccagatacagatgatccaggacgacaagaaccgctgggcgctgtatctgaagcccgaacatcagaacgggtacagtatctatccagacaaggaggacgtgaaccgttttttctccacgctcaaacaggcgatggacaacatcgacaaggtacgcatggaactggcgcacaagtattatgtactggcggaaacacagccagacctgaaagtggacctgttcagcagcggggcgcaggacatcgacctgaaccggattcagcgtgtgtccgtattcaagaccaaacaagaaggaactctgtgcgtggcgaccatcgacgggaagaaactgcagccccggagcgtcacgcggcaacagtggcagcgcatgtggctggccgaggaccgtgcagaatataaacgccatctggcggccacgctttttgccgatgtgctgcgtaaaggacagacgcaggaagagactgccggaaagaaacaaggagaagaggataccctacagcaggataaggacaagcaccccaagcaagccaatgaggaatcccccaaaactgcttcatccttgaaagagttgcccataaaagatataccggaacaactgtatgacaaatacaagaaaatcaaagaggaacaaccggaagcggtcgtccttttcaaacatgagaacaagtattacgcttccatgtatgatgcggagaccatagcgaacgagctggacatgcctccggccaaagaacgcattccgtatgatgcggacaaaatcatattggtatttgaacacagcaatgaggaaacaaggcagcaaatccatgcgctgcgggcatacgtgatggattgtgacggtatgtccaaggcgcagcaaaacgagcctgcagaggcaactgacgaacagaacgagaacgaacaacgtccaaccatgaggaggtaaagatatggcaaacaagaatcaagaatatacggaacaatacgcagattatgcgatggcacagatgcggaggtacggcattccggcctccgtgacgctggcacagggcatactggaaagttccaacgggcagagccgtttggccgtgaatgagaacaaccatttcggcatcaaggccacgcccgaatggattgccgaaggtggccggtacggtctgtattccgatgacaagccgaacgagaagttttgcagctacgacagcgtgggcgattcgtatgagcaccactcacgcttcctgaaagagaacagccgctatgcccgctgtttctcgctctcgcccgatgactacaagggctggacacagggcctcgaaaaggcgggctatgccacgggcgggcattatgccgacagcctgcaacgtatcatcgaacagaacgggctgcaaaagtacgaccggcaggtcatgcaggaaatggagacgcagggaaagcggttcggcgtggaagagaacccgctccgtgaggtcggaaatacagtggactattcgtttccggtggagcggaaagagtttcttttcgtcacctcgccattcggtatgcggcaagatccggcagacggcaaggaacgtatgcacacgggtatcgacatccggtgcgacggcgatacggtcctggccacggaaaaagacggcaaggtcgtcgctgtcaaagacaaaggccatgcacccggtaacaaatcgctgaccgtggaatacacccgtccggacggcagcaaggtacagtgtacctacatgcacctcggcgaagtttccgtaaaggcaggcgatacggtacaggcaggccagaagctcggccgttccggtaacacggggacacggacgaccggggagcacctgcacttcggtgtccggcagatttatgcggacggcacgcagcgggacgtcgatccggcagcgtatctggctgaaatcgcacaaaagggccacatcaaacagcaggtactacataacggcaacgacctgctcgcccgatataagggaacagaagagaatgccaccggcaaaagcctttcgcccgatgcgtggatgaaaaaactgctctcctcggaggatagcggcgtgggattgtcggggtgcagtgatcctgtcgtggaaatggccatgaccgcctttacctccctgatgttactggcgacgcaaatcgacagcaagaacaaggaggaacaaaaggcagccatttccgaggcgatggacagccggcgtatcgacctcaaagcgttgctgccgggcatgaaaacctgtgacctcacagtcggggaaaacgggcgagctgtcctgcaggcggacaacggcagcgttcaggtatcacgggaactggcctctgccgagttaagccgcctgtcggtgacgctgaacgacagttctctttcggaggaagccaaacggctgcgtgtgaccggcgtgctgaacacggtcatcctctcggaggcggcgtcgcagaactttgaacggggaatgtccgaacaacgggcacaatcggaaaacctgaaaagataatcccaaaaagtcatgataaaacgcgtgatgatacgactttgcgggtacttgtccggggtgtccgtctgcgccctgcatatcctgttctgttcccggctattcggttgggtagcaacactcgttatcgtgggcgtccaactgggtattgccggctggattgtctacatgagaatacgtgctcccgattaggaaacgctttcaacctgttcaacttcaagacaccccgctttgtccggtggactatgtatcactaaaagacaaaataaaatgattaaatgcaatattacggcgtgcggcaccatcggccgcgacgcttcgatgcgcacgaccaaagaagagaaaacattcctgacctttccgctccgcgtcgtgctccaaggcaaggacggtcggaacgaaacggtcgagatcagtgtcagcaaggagggcggtcagaagaaggtatccggctatcgaaacggattgcgtgtcgaggttgcggggacgctgttcctgaaacgccggggcgaaaagctctatttcaacctctttgccgaccgtatcggcccggcggcggacatcgcggattccatcaagggcgaactgtcgttccggggcaaggtgggcaagaacatcgaggaacggaaggacaaaaaggataagtcctacacgatgttctctgcattcagcaccgaaaaggtcgatgagaatttcgagtaccaatgggtgcgtttcttctgcttcgacaggcaacgtgaagagtggctgcaaccgggcgtcaaggtagaagccaagggcgaaatgacggtctcggtacataacgggaagccggacatctcctgccgggtggaagaactggcgcaatatattcccgaatcggataacttcaatcagtagcagtcatggccggttatagaaagcgaaatacggaggggccgagcagcgaggacaaggcgctggacctctttgccgagatgatgattttatgttgaggtcaacataaaatcattaatgttgcccatttgtttatgtcagtttctttcatatttatttgataattagagttcttatcgaattttgtacaacataattttggatgctcgtttatattatatagtattactcatataattataagagcatgttagaacaaatcattatccgcaagtcattccttaaaaaacatttggctgcaccattattaaaggagcgagaatactttctaactatgaaaagtaaggaaggattgtcccggctaacactattggggtgggctgggtattcgctcaagtttatccaatatttcgatcttcatgatggcgaaaagagaattgtgtcacttgatgatgtcgttgaagctgcacgtcaatggtcttcacccattcctgatcattatcattctcggaaacgtcatgattgcccttcctcaagaatcaaattcattgagatggctgttgaattcttactatacgtaggtcttttagattctcgttaccaagacgacatcatcaattatctcgcagagcgcaaatggcacagagtcagactgattgccgctcccttttataaagagagaatgtctttcttgatggattgcaaatcaaaaggttttaaaagacagacacttcagctttatgcacagtatcaacttcatctaatagagtatcttgatttaaagaacttccgtattgttaccaatgaggaaatctcaaatgcagcaaaaaaatggcaaaacctggaagacaaaggttctcacaagaagaaaggcaccaagtctaattatagtttcttcatctattttgcaaatatgtggcttaaagagctacatatgctaccagaatcaggatctccttcaatatcagatatacgcataaatgaataccttaatcacttggcatacaggagatattctcatgcctatattaagggaaggagatatatactcacctacttttacaagataatagaaaaggagaaccaggaacaccctttaacattggaagatatagataaatacattgaatactacacgattaacaaggttcaacgtaacacgctgaaagagtacctgtgttgtattcgtgtatatcttcgttatgcagtcgaaaaggggtggtgtattaccgacctagataaggcgttaatcactcccaaagtatatagtgaagaaaatctcccttctttcttgccgtggaataaagttcaaaaactgttacaaacagtcaaagaacaaactggtaaatccgcatcgcgcgactatgctatttttatgttacttgctatgtacggtttacgttgtagtgaggtggcaaacttgaagattagcgacatcgattggcgtaaagaacaagtctatattaagcgtgcgaagaattgtcgaccacaagtgttaccacttctacataatgtaggagaagctattatcgcttacctaaaacagggaaggccaaatgacataggaagcgatagcttgttcttttgtacaccagccccgatacgtcctatatcttgtacagccatagcttccgtcgtatataggtatttgaaatccagcgaaatggacgttaggcacaaaggtccccattgtttacgccatagccatgcaactttcttgataaacgaaggacaaaccttaaaggatgtcggtgatttactgggtcacaaaagtatggaagcgacaagaatatatgcaaaagtggatctcaattcacttagagatgtttcaaatattaactggggggagcttctatgagtataaaagaaactgttgagtcatttatcaagtttcgtaggtctattggtcgtaaggatcagagtacaacttactctttgagattatttgctaagttcattggagaaacaacagaattaacttcaataacggaaagcgattgtaatgccttcctttacagaaaaggaaatgtcatcaccagatattggcattctcagcactgcattctgaaaaaactttttgagtgggctttttctagaggactcattcaaaacatacctattcccgtttttctgcctaaagctccagagtattatcccgcttacatatatacggatgacgaactgaagagactgtttgattgtgcgcttacatatcgcaaatatagatcatttgttaatgagccaatatgtatacgatatatcttgatgatcacgtatatgcttggactcagaataagtgagaccttatccttaaaaataaaggatattgatatggataatatgtacgtgcatatacattgtagtaagttctacaagtctcgcttggttactttcaacgaacaaatatcaaaattgatgcaagagatattacaatggcgaagtactcaaatgtccccaatggtagaggatgcatatgttttcattaatcagaaggggaaacctgttaattttgtatctttacatcagatatttgcgaccattcgtaagaatgcaggtctttatttccctgatagaggacgtcatcagcctagaatacatgatcttcgccatacttttgcggtcgacgtccttactaactggtataaatcaggaaagaacgtacaggatttactgccgaagttgtctatctatttgggacatcttaacgtgtccttcacttccgtctatctaacaaagacgccaactttgttgcaggaagcaaacaaattgttttatgcttataaaaacacgaacaatgaagaacagaagaattactgaaacagaatatcttggctattggctaagaccattcctcatagagtacttaattgtcactcgaaaccttagtcgtaacactcagatgagttatcgtgatacattccgtatgttggtatcgtatgtctctacattaataagtattgcaatagacaatctcaaaatctcggatattacgactgacgttattacgaaatttcttgattatctggaaattgagagaaaagtttccgtatcttcaagaaacaatcgtttagctgcaataaaggctttcgcaaagtttctggcgtggaaatctcctgaacatatagattggtgtcaccatgtcactcttatcccttcaaagaaaacggaaaaacgcatgataacctatatggacaaatctgagatcgaagccttggctgatgcaccattgaaaacatgcaaatatcaagggataagaagtcgagatcatgtcattatcctattcatgtataatactggcgcccgagtgtctgaagttattggtgttaaagtgaaggatgttgcgatgccttcaaaacgtggaatgccaatggtgacattacatggcaaggggcgtaaagagagaatatgtcctttatgggaggatttctgggatttactcaaacaatttatagacaacaagttgcctgacgattaccttttccttaaccgatacaatcagcctatgagccgattctgtatttatgaaatgataaagaaatactcacaagatgtaatcttaaatcatccctctcttgctaataaacgcccatctcctcacgttatacgccatacaaccgccactcatctacttaattctggagcggatattgatatggttagaaattggatgggacatagctcgattgatacaacaaacatctacgccgaaattagcatggaaaggaaattagaagttctcaaaaaatgtgagcagtccgtttccgatacaccatcacgaaaatggtctgaggataaggagttaattacattcttagatagcctctaattcctccaaagatagaattatgttgtgcaaaatgtcaaagaacgattgattattaattgtttagactaatgcccaacataattctatgtcagacataaatgatcgagaaaatcgaaagcatccacaaggactggcataagccgtggtttaccgagggggcactgcaatggccgcgtaacctttccgggcgggagtacaacggtatgaacgcccttatgttactgttgcattgtgagaatgaggggtacaagattccgcgcttctgcacctttgactgcgtgcagcggctcaacaagcccggcaaggacgggcaggaattaccccgtgtatctgtactgcgcggcgagaaatcgtttcccgtcatgctgaccacattcacctgcatacataaggaaacaaaggagaaaatcaagtacgacgactacaagaaactctccgacgaagagaaggcgcaatacaatgtctatccgaaaatgcaggtgttccgggtgttcaatgtcgcccagaccaacctgcaggaggctcgaccggagttatgggagcagttggaaagagagaacgggaaaagggtcgaaaacggcgaacatttcagttttgggcctgtcgatgcgatgataaaggacaacctttggatttgtcccatcaaaccgacgcaccaaaacgaagcatactactcaatcacaaagaacgagattgtcgtacccgaaaaggagcagttcagagacggggaatctttctacggaacgctgttccatgagatggtccattccacgggtgccgaaggtgtgcttgaccgactccaacctacctctttcggttcgaaagagtatgcccgcgaggaactggtggccgaactgggcagcgcgttggtcgcacaacgctacggcatgaccaagcatataaaggaagacagttgcgcatacctcaaagggtggctcgatgagttgaaagaatccccacagtttatcaagacaacgcttctggacgtgaaaagagcttcgtcaatcgttactcaaaaggtggataagattgcgcaggagttggaacaaaatgttaccgaagagcaagaggacaaacgctctgccaaggaacgtattttttatgcttcggtggcctatctccaaaccgctgacgacacgaagcaactggacgaattgaaggacaaaggcgactacaagggtctgcttgcgctcgccaaggagtattacgacggcaacggcatggacgagcagcatacatacgcttctcccctccagaaccggggcgatgacctgctgattgaagataaggactttgccgtggtgtacaacggaagtgtcggaggcacatacgacatcatgctgaaatacacggaacaggaggtgcgggaccatatcacacgttacggcacagaccgtgccagcgatgatgtgaaagaggtggccaaagatatggcggcggaacagtttgctgaactgacacatcagagaatgccggtattcgaaatgccaaacggagatattctgtatgcaaggtacaacagggacaaggatacgctggacgtgggtacggccaccaatgcagggatggccgtacaacatcattacccttatgaccacaacatgacgctggaggccaacctgcaagccgtgaacgagaagctgaacgagcttgaagaatacagggaggagctacaagaggcggaatatggcggcggtctgcgtcggtaacggcagcgtaatatgaagaatgtggagcgatttcatactgaaggcgctccacatccttatagtccctaccggttttcattccgctacagactatatgttatcattacgacagcagtttgtcaatcattgactgtaactgcagcatatcgcaatattgattgtttccgccggtataatcctttgcgtgccgggcagtccgtatcatgaacgaaccgagttctatctttatcccatcatccatccgcacatccgcagaatggtttatgtatacaaacttaccattacgttcaataaagcaacttgtataataatgccccttattctcggatacgaccgccgcatccacggcttctgcatatttggatatttcacgtagcaatgccgtttggaaattactgtattcctttgaaacataagtttctgcgtctgcaaggacagaagattgccattgggtataaaaagtctgtgtcatattctttcaattctaattctgtaaataaattaggcacatagcaataaaagtattgaatttatagtattcaattaacatttaagcaattaccatgatgttttcagagaccaaaattacggagatttattgtatgacagatgatttttgcaaagaaattgctcaatttcaggaaaaatatatggttgaagataaagatattgaatattccatgccccacttcctttaatataactttatttccaactccctttctaccataacagcatactgtttttgaaagaagcccgccattgatgtatgtttttcaaagacgggcaactggctatattttgaattatactcacgttaaatagctttcccaattctctttgtcgatagttaatttgttcatttcccaatcgtattccacttccggtatatcggaataagggaagtgcacggtatagcctatctgtccgtaggagcaatgcagcggtacaacgcaaatttcctgaccgcaataagactgtggcgtacagtatttcttccaatcaaaacggcctgcaactatattgcagcagagcagttttagagccattatgcctttccaactctgaaaatctttcttgtaacttgctcttttcataatgaataccatttaatgagccatgttgtagtaaatttcgggttcgctcgatacgttgtaaatctgactcccgcaacgtaccaatagggcgttttttccgtagtaaagctgcttcatgccggttatgttccccgtgcggtgaaagtttgggaaacggcttattcctgccttttcggcgtctcgtgtgtagagggttttcgttctcattgcatggttgtttttaatgtttcataaagtttttctatcatggcttccgcctgctccatatcgctcacgatgtctttgattcggtaaggtgcgccgttcttgccatgcccgtccgtaccaatccacaggtaggcttcatagtcggggtcgaagtcttcgtaatatgtttcaacttcctgtaacaagctgtcggtgtcattgcctttcatctcaaccgagaaactgaaatcctgcccgtgaggtgtgtattgctgaaaatcgaacaccacgaggttcggtttgtcggtatcggttttaacttgccagcctaattgttcagctatggcgataatctgttctattgctgtcattgttctgtttttttatttcccttttcttgaagccttccgacttcgcccaaagggttgatttttacgtgcaattcccaacggcgaaagcaagaacagcaggcaaggaacggaggttaaaattttatgaaatgccgcaatctgcgattgcggaaagtttgcgtcaaattttatccggagtagcgaagcggtacttgacacgctgttcgttcgccgtacctttgctgcgtaaaaacaggccgtggcgatagtggagattccatgaaatgatacgcccaagcatacaaagggaatggaggcaaagatctccggccgttacaacaggaaacgacggcagtatgtgtctggggtataaagggcaaaaaaaacgtcgaacgattgtccatcggacaaaatgtaagggaatggaaaaagaattgtctgtataacagaatgttcgacatggcctttatcgggaatatgaacaaccacctgtcccgattggcaggtggttgcccgatataacttccgcagccggtatcaggcggccatgcgctttcggataagggcgatgttcttatgcacgaggttcataatccgcttgtgatatttcgtatttttattacacagtcctctcgactgcagcaccttgaatgtttcgaggctcaattctacggtctcgaccctcttgtcctctatccgtgcggagaataccagcgtatccggtttgaggtaatattcgcactgtcccacgcagtggtgcaacgcattaccctcgtcgtagtaggcttccacgctatccagtacacggacgactatcgttccgtccgtgaactccagaccgaagaacttgcctttcaactccctaaaacgtgcctcgttttccctcgcccgtttcatctgctccttgcgtttttcctgctcttggagaatacgcaccttgttctgatacttgtcatgctcggctttcaaatcggcggggcaaacatagtgggcgttgtgcaagtccttgccgcatctgtcgagcatacggagataatccacccatattccaatgtccgttatccgatacttctggcgtaacacgattttgtaggacggccaacagaaatccaaatcctgcgggtggtcgatgaagtgcttgaggtctcgtttgcgtccacttttaagtattgtctccactcggctgtccgatagcagggctttcatcagcttttgcggggcgatgtcggcaaacgaccctttcagcccgttgcgccgtaacttcgggataaccgtgtagcccggacagacataacagtcggctatgcgttggtacacgtaattgtcgttccgcagttccaatcccgacccgtacagaaagctgtccaaataacaccccattgtccgttgcaaggctgtcaaagcggttttcccgttctcgtccaaccagtatctcgccacttcgcacacgtctgtccatgcgttcttgcctttgcggtaacagacattcattctgaaaatccgctgcacctgaaatccgtcctgcgtggtgatgacagaaaaatagcttttctcatctgtcttgcggcaaagcgtgtctttgagcgtcagtttggcgtggcagttcgggcaatggcaacgcttcgcctttgtctcgttccacctatgaccgcaatcgaggcaggtcgtttgtccgctcggtgtacgaaaagcgtaatgtccgacggtatgccggaacgcccattctgcctgtttctccgtgataggcagcaaccgcccgttggcggctactacctgatgctgaaattttgtccgtgctttcatggtcagaaatcgaagagtgagagttccgtttgggtattctgtacagctttggcggtcggcttcggcctgctgtggcgttgctgtatcttgcgcatttcttcctcctgataggctttcagcgcgtcttttcgggcttgcgccttttcttcttcggtcagctccaccttgtgattgaccacgacgccacaactgataggtttgcccacgtcgatgttgtcctcatcatagtaatgaatggcgagcgaccacacctcgtcgtcggtcattccgcaacagccgcttgccttgacttgattgagaatgaatgtgatacaatcgtccaagtttttgttttctttggcataggagacggcgaaaagttcgtccgtccgtgccttgccgtccaagtattccttgatagtccgtttgaaatgttccgtacctttcatcgttcagcgttttgaggttaaaaatgatagtcgatgacaccgccgatgtaaagcagcgtaccgggtttaaattcacatgcctgccgcaggaactcgtaggattgctcggcgttggattgcagcccctcctcgtccatgtagaaccagtaagcggtatcgagcgggtttttcaggaacttttcgagttgatagaccgggccaatccagtcctgcacgctttcgggggtaagggcttccgccctgcttcgaatgtctgcgatgaaatcttctctccatcgttccgcaccgcctttgtagcgtatggtatcgtcggaaacaagctcgaacatgcctttgggcagaatgttgtttaccaagttgtcgatatggaactggcgttcctcatcgtcaatctccgcacaatagtcaaagaaactatcgtcgccctgcgtgagggtgtcctcgttcaggtagttgtccttgctcacccgtgtttcggtaatttgaaaaatcttgctgtgcataactttaaatttttaatttgttgaacttgcttttttcttctccctgctttcggagcctttcggcttccttggcgggagagattttacatgcaagccagacagcggggaaaggacggaaaggcaagcaaacggccggagaatttcacggaatacccaacccgtcgaggtacgaggcgggggctgaaaggccatcttcgatttgcggaaggctgccgggcaaatccgcgagccgttagcatagtggtgcttgacgccggacgaccgctgtacctttgcatgagaaaatccaaccggcgaggaggcaacgggggcgagatcagggaaagaatgggataaccggaataaaagaggaagaagcccgattgtatatagaagtgggaataacggctaaaaaagaaaatctgcctgtgagggcgattgacaaaaaaagccccctgaaccttttgaccgtccaagggacttcacgtgcccggcaaagcggaattttcggaacgcgagccggattataaggtggcttttaatcgtaatgcataattcaacagatattttcctgaatcggaaaactcttttttatttcctgtatagacatacccgtggctctcataaaattttcttgctgcaaaattttcttccaacacccacaggtaaacctcttttacatcgtgactttttgctgttgtaaggaaatggcgcataagttttgtcccaacaccttctccttgaaagaacggatctacatacaactctttcaattcccatatactgtttttacaatccagtttcatcatcccctttacaatcccgtcatcaaaaacatatatatcgtccaaagctcctataacatcctgataatataatgcaagacgcaataccgacatttcattaaaggaaacatcatcgttttgaaaaatagggcgaaaggcttttcttttagagaaaatctgtatttccgcaagtcttgaagcatcctttatcgtggcaactctaatcatttttttgtttttataattttgtatttacatattattttcccaaaagtttctgttcttcacatactatccggcactgtttccagtatgtttttttcagaagcaaatatataaaaatcaattccacaaggtgccatgaacgactttttttattaagattcacaggaatgtgatataaaagagtttaactcctccgacgttcctttgcagctgcatagggtgtcgtgtgtcttgccttgatttgtcgggtaacgtcaggagcaaaaacgggaaacgctatcgggaggtagaaaggaatggaaatggggtataagggttataacaggtggacgtccgcttaaaaaggaatttcttgtgacatgccgggtatggcatataactggagagacgaccttgcggaataaagcccccgaaaccggctttgcaggttcggaggcttgtgccgcatgaggctatttatcagcgtttgccgtgcgcctgtcccagaagatagtcttgcagggattggtagcggttttgaatattagcgttttcattgaaaccgttcaggcaatgaagcaatgctttttcgagcgtgatgtatcggcggctgaaagtctgtacgttatccaagcaacaggcttccaaagcgtatttgaacggtgcaaaattttcaggttctttccgaatccgcacatgccacaggaagaacaactgaatcgtgaaactgtcggattcacctgctttcatcaaatgttcttcatcgagcaaccgtcggacaagctccggggtaagctggcaatcatttttccggtaatacatgcgttttgccgtattataggctgcaaactgttcgatgtcctgtgccgtctgcctgtatacttccgagtaaaatgcacgtacttctttacctgtaacaacgattttctcgtctccgaactcgtattcatacgctttttcatcggagatttcctcttctgttaaggtcttgaacccgtaacattccgttacgatgaacggttcttttccgaactccgccagagattcgagggcatggaggctgttgcaggagaagaacatgtcgtttccaatactttcaccgctttccagcagccggatttttacgtcttcggaatcgttggtgtacttccatactatccgacaacttgcataatggggcttcctgccgttcgcctcgacaaatccggcaaatccgctcttgatggcggcctttgtcttctctacatccgtcaggacgcttcgtgccttacaggtttcgcaccggccgaattgcaaagaatcgtcggaaatttccgttatcactttggtgttggggtttactgtggcttcgcatactacctgcgtaccgccacatcgtgtacatattatactcatatcttgtcaagattaaaaattaatatatctttctatccgctatattgaacttgtcgataaggttcagccaatggctgcaattccttttcaacaaaacaatttatccagattctgcttaaagcgtagcattaggcgacacttcccatcgcatttacgaaccgaccccatataggcgcattgaccgcttgtttcatcaaacaaaaaacatgactgccggaatgcctcaaaaattcttatcttaacctgttcgtccagaactttcccttccataatttgattaccatttgcgtgcataatacataaaagttaaattaaactccgagttatttatttccctcctctcggaagcttttcagctttccttgccgggagagattttacatgcagatcagacagcggggaaaggacgggaaggcaagcaaacagccggggatttcacggaatacccaacccgacaggcgcagcaaggagggaactgaaaggacatcttcgatttgggaaggctgccgggcaaatccacgagcggttagcatggcggtacttgacaccggacgaccgctgtacctttgcatgggaaaatccaaccggcgagaaagtggcggaaacgagataagggaaagaaggagatacgatagtggagtaaaaggggaagaagccggactgtataaaaaagccggaacattggctaaaaaaggaggtcgttccgtggaaacggcgtacagagaaagtcctctcgaacttttactgtccgagagggcttatcgtctactctataaaatggtaatgggcattttggcattctccgttcgattgtgtcttttgcaaaacgtcatcgacgctggaatatcggctaaaacagccgttatatatctgcttgccgtcgagcgttatccgttgcaggtaacagccgcatactccgtcacggctacggtcagcgacaaaatagaacacgataccgttgctgtacgacaatcgcaattccgtatagtttatctcggttttgggctgttcggtcggcagacgggtattgaaataacccgtagccagcatgacctgtccggcgaaacgcatggcttctgcccgatattttttcatggccgaagccacggggctttcgtcccgaccgtttccgacaaacgatgcgggcaggcttctgttcctgtaagacagtttgaacatgccgacctcttcctgcaccacgggcaggccgacagcttcgtactcctctttcgtcatttcgatgaaacgtgtgcgttcctcgtccagatagaggcggtaagcgggtttcacccgctcccgcttctcttcatattccgcctgttcccgtgcgttcatgcagttataaacgtgtcgggacactctccgcaccgcattgacgaaagtcgggcttttgcatatcccgaaatgccgggcgaagtcgggtacagtcccgataaagccgtactctttccaatgataggttctcatggctgtctgtccgatttaatccacgaccacatattcattgatactgcagcaagaatcggggttttcctgcgcccattcttcaaacagagccttggcatcctgttccgagcggacggtttttcctgcgacctcgccaagccacgcaaacaggctctccctgtcggcaaaatattcgcagaagtatttgcctttggcagtacataaatcgactatgtatttgtcggtaaaatacttgccttcgctgtcgttggtctcgtagaagcccattcccggctcttcggtctggtaataataacggagcgatgggaatttctcgcacacgaggtcgaatgtctcgttgcatggcccccatgccgtctccgtcgtaaagcggagggtttcgcctaccatttcgaggtttgcccaatctccccgacaactcaccttgtcccagtccttgcccaaggcatccacaagacaccccagccatgatgtcccgaagccgtttttcacggcaggcgtttttctgtcctgcaaatctttcatcaactcatagaggcttttgatttcctgcgcgtcgccctctatcacatacgctgttgaacaccagtttggcataatcgttaatttttattcgttaaactttttcttcccttttttcggaagctgttccggcttccttatcgggatagattttacatgcaggccagacagcgggaaaatgaggaaaaggcaaggaaaccgccggggattgaacggaatacccaacccgacagcgcagcacggcggggaccgaaaggtcatcttcgatttgggaaggctgccgggcaaatccgcgagccggttagcggagcggtacttgacgaccgaatgacgctgtaccttcgcatgggaaaatcacaccgacaagggagtgcggcagggagcgataagaacgagaataaataaaaaggagaggtgaacgggatataacgggtatagaatatggacttgaaaaggaaatttttcggtataattataataaggtgtttccggacacgaggccgggtagccgtcttgtctctgccataaccgaaaggtccagcgaacaatgaataacgcagcatcgttcagcagtcagaaacagtaactatgccgtcgtactgatttacgacaatgccgataaaataaggaaaagccgaaaagaggggcttgccttctttccggcttttcgtgaaagtcctattatccgggcttcccgttattctatacggtccagcctgcggacttctcttgaatcgtccacagacgggcataaagcccctcgtgccgcatcagttcgtcgtgcgtgccttgttcttttacccgtccgtcttccagaacgacgatccggtccgcattcatgatcgtcttaagcttgtgggcgatgacgatgacggtgcgtcccttgataagcgtgtcgatggctttctgcacctccacctcgttttccgggtcgagcgatgcggtcgcctcgtccagcaggataatcggcgcatccttcaagatggcgcgggcgatggatatgcgctgtttctcgccgccggacagcgtgcaaccgccctcacccaccatcgtgtcgtatccctgcggcaggcgcatgatgaaatcgtggcagcaggctttctcggctgccgcgatgatctcctcgtccgtcgcaccgggctttccgaaacggatattgtcgcgtatcgtgtcctgaaacagatagacgtcctggaacaccatcgagatgcggctcatcagactttcaggttctatatctttcatcggaacgccatcgaaaaggacacgcccctgctgcgggtcgtagaatcgggcgcaaagtttcatcaccgtacttttcccgctccccgaaggaccgacgagagccgtcagcgtgtttctcggaaacgcgatggaaacgtcctgaagcaccttcttgtcctgataggcgaacgacacatgctcgaaccggatgtcgccggtggccggcgcctgccgttcgccttccatctccggctcgttcatcagcgtgagaatacgccctccggcaatggagaagtagcggaactccgcaaagttggtcagcgccgaagtcagcgggtcgaacacgcgcgagccgaccacgaggaacagcacgaagacgagcagcgagagttcgcctcccaacagcaggtaggttccgcacagcaccatcagggtcagtccggcccgcaccaatgtaatgctcagcagcacgaaaggccccagcatggcttcctgacggatacaggcacggcgcagttccgcaaaagcatcgcgcaggcggacaaagcggtcgcccagcaggttgtaggctttcatcacgcgaatgccctgcaagtattcctccaagcggttcccggcattgattttggcttgtatctgcctgccgctcaactttttctgcacactcgtgctcatccataggacaagcaaggcgaccggcagtgcggcgaacatggcaacggccatccgccagtcgatccataccagcgagaggaatgccagcacgggcatgacgacggctcccatcagttggggcaaatggtgggaaatgcccgtctcggccatcgtgaaatcggtaacgagcatggacgaaagatcgccggggtcgcgccgggaaagaaatccgagagagagtttccgcagatgttccgccagtgcaatgcgccccgacgcactcatttcgtaggctcctctgaaattggcccggtaggaggcccgttcggccaaagccatcaccagcatatagacagccaatatgccgaaaatgcaccacagtcttgccgtgtcgagcggtcgtccgctgccgtcgaacgcggcgaagatgatgcgcaccgcctcgatggagaggcagaaaggtatgatgttgaccagattggcgagcatggtatagcccacgggcttgtaaagacgttccgtatggcctatcgtaatgtttttaatcgcattcatgttccactcctttcatttatgtgcgacgatatgcagttcttcttttttctgaattacccggatgtcggaaaagccggcttgggacagcaactgtttcagttcttcggctccgtacaccgtcattccctttatccgctccgtccacgcctttccgagttcggggtcgctcgcttccagactgatgagaaagcagccccctttccggatcacgcggaagacttcggccagcgccttgctgacggaagaccagaaatagacggtctcgaaggccgtaacggcatcgaaggccccgtccccgtaaggcagggagcagacatcgccctgctgtatgaaacatcggcggtccagttctcccgcattgtgcctgcgggcgaaggcgacgctctcctccgacaggtccatgccgtaaacttttccctgcggacacagcttcagcagacgcttcacgttggcgccgcccccgcatccgatgtccagcacattccattccggccgccagtccacctgtttcatgccgcgatgggccagcgaagcgtggaaacagttcattccccgcaaaatcatccgtccccagaatccctgcggacaactcgtattctgtaaaatatcgttcaagaaactattctttttcatatctccgtattcaatttttgttcaacttccaatgataagcgctcgtataggcatcccacatgttcttgtagagcccctcggcgacggataagtcgtcgtgctggccctgctgtacgatccgtccctgctgcaagaccacgatgttgtccgccgagacgatggacgacagccggtgggcgataataatcacggtcttgccttttatcagggattgaagggcctgctgcatcttgtattcgttctccggatcggcgaaggccgtggcttcgtccagtaccagtatcggcgcattcttcagaatggcgcgggccacgcatacccgctgcgcctcgccgcccgacagatacacgccctcgtcgcctattctcgtctcgtagccttgcggcagccgctcgatgaactcgtggcactgggcggctttggccgccgccacgaccgtttctttcgttgcggcgggggaaccgacggcgatgttctcgtacagcgtgtcgtagaacaggaacgtatcctgaaagacgaatgaaacggtatccatcaactgcgtcgtagcgatgttcttgatgttcacgccaccgatgagaatctcgccctgctccacgtcccagaaacggggaatcaggttcgcgacggtggacttgccgcttcccgaaggccccacgagcgccgtaatccggccttgcggcgccgtgaagcaaacatcgcgcagcgcctcggtacgtgtgccctgttccgtattttcgtaggagaatgacacgtggcggaactccacctcatacgactgcggcacttcggggtgttccggttcgggaacgggctttttctccagaatgcggtcgatacgcgccacgccttcgtcgatctccttggtgtttccgcccaggaacgtcagtttgtagatgggcgaagccacacccggtcccatgatgatgaaaaacagccatacggcggccaatgcgagcgactgcggattcccttgtatcagcaggatacccacgggaagaatgaacgtcaccatcgaacccagcaggacggtgaacgcgatcatcccgttctggtaggtgtcgcagcatttcagggcgaatgtcttgtaagcctgtatctcggcgttgaactgccggaacgagcggacgctctgtccgaatatcttcaccacgggcattcccctgacgtactgcacggcggaggcgctcatcttttcctgcgcatcatagtaaatactcatgaactcccgtgccttcttccccatgaaattggagaattgcagggcgaagctcaacagcaccacggccagacagaccgccgtcagccatgtatccagcgagaaaaagatgacgagcatcaccacgaccgtcgccactacgttcaccaaatcgggaatcgtgtgggcgatgaatccctcgattttctcgatgttctgctccatcgtcttcttgatggctccggtagaggtgttgttgagataacccagcgacagtttgccgatatgctcggacagccggacacgcaatccgtacagaatgcggaatgcagccacgtgcgaggacatcagggcggcgtacagcagcaccagtccgccgataagcccgcagaaggcgatccagccccaacgaatcatgccggcttcgtccaccgaagccgggcttgtaccgtgcgtcagcagctctttcaacacctcgtacaccgcccaatagggtacgagcatacacacggcgctgcctgccgacagcagacccgccagaaaaagcagccctttcttctgccccgcgatctcgaacaggcgggacagaccttctttcttcttttcttttgtttccatatattgaattttatccgattctctctatccgttgttggtaaattcctgtaaatcttccggccggattacaacagccccgtcagccgctccccgctcttttgtcagccggaaatcgcagcacgaagcaccgtgtgccaatgtgcgggtccgtgtcagccggataccgagtacatcgtgtgtgatataatcattcacgcagaaataggggaaaaagcactcgacgccaatacgggaacagagttcggcgaccgggcaccgggcaatgtccataccgacatcgaacgtatcgtccgcattcggcaacacgcaatcgaacagccaatcgtcctctgtggaaacatgcgaagcggaagcgatgcgacgcacatagtcgggcgaacacaacatttcgcgtatttccgaaattttttcagaagggatactcgacaacgtgagctttttcaatgctttctgcgtaacaatggaaagttctgccggactccatcctctggccgacagttcttgccacagaccgatctcataggctataccgataatgtttttcacccatggtgatgtcggcgggacatccggaatgattgcggagatacgatgaaaattctcgacagccgcttccatcacggaatcaacggattcgaccgacaaacgggatgccagttcttccctgaaaaattcttcgaaccgttccaacattgggagataaggttcaatcgtcgtctctttcatctttcatggagaattgccgccgtgtcacgggaattcgatacgatttcatatcccaacatcgaactgaacttgtagcacagccgcgtcatccgtcccaatatttgcccgaagaagaagccccagcgcggacggaaaaacttcatgtaattggcctgttccaaaaggcgtaggcggggttcccattgttctaccagacgcccgtcgctcagaccggagcggatttgcgcctcgtgttcacggagcgaatcgggtttcactccgtgacggctcatcatcgtaccgcagacgtcgaaccacagttcgccgcccccgaaacgctcggccacatggtgcagaaatgtttttacctgcttttcatagaaatacatcagcacgccttcgaccacgaagatgaaatgcgcatcgggatgccggcgacgcaggtcgtccagccagccggcatccagcagggaggccgcaatgtaggggttgcccggctgctccggaatcagctcgcggcgcagcgcgatgacttccggcaggtccatgtcgtagaatacggccttcccgtcgccgatacgctggaaacgggtgtccagaccacagcccacattcaccaccaccgcatcggcgtgcttccctatgaagcggcgcacggcacggtcgaaaaaccacccgcgcacgacgcagccgacctcgctcaacttcgccccgtcgaaacgggagtagtcgtattccagactgtccaccagcccctccgcaaccttgtcgttcagaatcgggttctttcggcggctctctttcgccctgtaatagagcggaatgagcaatgtctcggcgacaatgctctcgaatttatgtctctgtttcatttgttatgatatttattaatgaacgatattcagatttgttcacgaataaaaaaagaggaaacctttgtgaagatttcctcttttcccgctgccccgttacggcagcttgtccgtatgtgtcttttctatctgtcataccttgataatggccctccaaccttgaatttcaaacagaatatagtcatgcagaatggattccatttcctgtttgggcaccgcgtgcatcaacagctcctcgaacagcgtgaacatccacaccgtatgcaggtgaatgataaaatcggacacagccgtatttatattcgggtacttcttcttcatggcggcgaaccatgccttgaccagcccggtcgaacggtcggtgtagctttcgcgaaaatgttccagcgaagagccttgggcacggaacaacaggatctccagcaggctgcgatgcgtttcgatgagcgaaacgtattcgtcgatacaggctttcaggtatttttcggaacgcatcgtcatcacgtcctcgccgcgtatgccgtgatgctcctgcaacatggcttccatagcgtgcaggacgggacggaccacttcacagaacaattcgtccttgttccggaaataattatatatgttccccacaccgacaccgacggctccggcaatctcgcgcatggaggtcttggaatacccctgctgcccgaatcgctgttcggcgactgccaatatgcggccgcgtatgtcttctttgagtacctgcataaataatgaacgatgtttccgtttatatttttgcaaaagtacggggtttgaatttactggacaatacctatttatggtgattttacatgattgaaataagggaaaagcaggtattaccggaggtagcgaaataccttgtctatatccttgtctatatccgaaaggaaaagtcatattgttcattgaaaaggagaaagtctcatagattataattacttttgtacataaaacccaaagaatcaaatataaaatggcaaagattacagtaaaagacacaagtgtcacaattatatcagtcaacgagaatgattatatcagcctgacagacatagcaagatacaaaagcgatgacccgactgcggttatcgggaactggctgcgtaaccggaatacaatagaatatctgggtatttgggagagtttgtacaacccgagttttaaacccctcgaattcgaggggtttaaaaaggaagccgggctgaacgcctttaccttatcaccgacaaaatggataagtacgacaaacgcaataggcatactctccaaatcgggacgctacggcggcacttacgctcacaaggatatagcatttaagtttgcaagctggatttccgttgaatttgaactgtatattataaaggagttccaacgattaaagaccgaggaacaacagcaactcggttggtcagccaaacgggaactgtcgaaaatcaactaccgcatacataccgatgccataaaacagaaccttatcccggcagaggtaaccgccaaacaagccagtattatctatgccgatgaagccgatatgctgaatgtggcgatgttcggtatgaccgccaagatgtggcgtgagcaacaccccgaactgaaagggaatatccgggactatgccacaatcaatgagcttatttgcctctcaaatatggaaaacctcaatgcagtatttatagaccaaggtattccgcagggtgagcggttgattaaactcaatcagatagccattcaacagatgagaatattgggaactggcggcagcgaacgcaagttattaaagtagatgagtctctatcagaatttgtgccgagtacgtgatgaacaatacactatcaaaccatgacgaataaagatgaaatgacaatgaactctgataaaaacgcctattttctatcgcttccggagataaccgaattatccgttcctcctaaaacgatattgttggaagaaggcaaggtagccgacagaatgtacctgatccggaaaggttgcctgcgcctgtttttcaacaacgaaggacgggacatcactttccagttctttttcgaaggggatttcgtcgcgtcattcgacagcctgtatcaacggacaccgagccttttttccctggaaagcatagagccggcagaactgtcggttatgaagcgggaagattttttcagaaacctcggacagaagcccgcgctacggcagatatacgaggaaaaaatcatcgaacgcttccatgtttatcagcggctcttcctttcccgcataaagaacaccccccaacaacggtatgaagaactgctgaaagaacacccctctatcatacagcggattccccagcattatattgcctcctatttggggattacttctgtttccctgtcgaggatcagaaacaggcgatagttcatttctttacatttgttatcgtccggttccagtcgaagatgcgaactttgccgcatctattaaaaccgaaagacagatgaaaaagatttttataatagactggagcctgattcccgtgtttgtcctgtccgcatactccggaatcgaattgcatgtggccgactatgaaggcaatcacgaggtatggcataattgggcagttttccatgtcctgacgagcctgctgttcctcatggcctccatatttcatatagcgacgcattggggctggtacaagggaactgccaagaacggaataggccggaaaagcaaggtcacggcggtactgtcggtcctgttcctgtccgtggttctgaccggatttgccctgttaggcatagaaggagcaggttccccggtcgggcaatgtcatttttgggcaggaatcgttacaactgtcctttctatcggccatatactgaaacgccttccgttgctacgcaaatcattgaaataagcacaacctattcaacggacaacttccggacaaagcgttcttacagaaatcggggtacttattacaaatgcggcttcttgcttactgtcgagaagaccgcatttttctttatttttcggcatatcattcgatttcagcattgctcgtccaaccatttggggcatccggtccattcgttgccccttcaaatccggcatcagagaatggctgttgtcataggcaccgacttcatgcagttccacgaatgaggcatttcctccgtaacggtttatgtttttcacgagcttacggcctgtccggagaaaacatacgtgccagtttttcccgacgagattccgaaaagacattaaaatagttgaagaataaaatgttacgcatacaattatgtacagaatcctttcatttcgaaccatcatgccttatttataccggacgggggcaatgtcgctcccgtaaaataattaaggattatgataataggttatttaagggtcagcacgggcaaacagaacccggctaaccaacaagacgagatccggcgtttcgccgacagtagaaatctttccgtcagccagtgggtgacggaggtcgccagcggcaagaagaaggggtgcgaccgcaaattagggggactgatacggcgcatgaaacggggcgacacgctgattgtcacggaagtttcgcggctaagccgcacgctgacggacctcatggccatcatgggcaagtgtctggagaagggaatcaacctttacacaaccaaggaggggtattcgttcgacaactccatcaacagcaaggtactttgtttcgcgttcggtctggtagcggaaattgaacgcaacctgatttcgatgcgcacgaaggaggctctcgccctccggaaagccgagggtgtcgtccttggtcggaaaaaaggcagctacacgaaaatgaacgtgctgatcgaaaaccgaaaggtcatcgttggcatgttgaagcggaactgtacgattgccgatatatgcaggcgtttcgacatttcgcgggatacattcatgaaattccgtagccgctataaggaaatagataaggccatgaaagagaaagagataagacggaaaggggagttgcaaaaacggagggtatgattttacgttggttaaatcgttggtttaatcgttcgttttcagccacaaaattacaaaaacacgaattatccacaaaaaaaatctgcaaaaaattgcgtttcagttctttgagtaggacaaattttcccggagtgtccgaataatacgaccttttttccgatagtctttttaacgaacaaataaatcggcataactgacagttatccggctgattatttgttggttcggtgcttttttacctctaaagaaagaagcacggcacggacaaacgtacagagattgaataaatagctgatataaataaattggcatagacagaattatgacaatgaaacgaatactgttattatttcttttattctgcggcgggtatgttcatgcgcaagagttggactcggcccgtatccattaccggcagggccacagggaagtggacgtgctcttccgggacaaccgcgcggaactggagcgttttatccgcaccctgcgtgaagaacacggtgcggaccgccttgaaagcgtcgtgatacgctcgtgggcatcgcccgaaggtgtgaaccgtctcaacggggtgctgtcagagcgcagggccgactccctgaaatcctatctcgtgcgccacgccggaatccccgacagtttgatctgcatacatggagaaggtattgcgtgggacatgctgcgccagatggtcgccgcctcggacatattatacaaggaagaggtgctgcatatccttgaccatacgcccgtatgggtgttcgacaaggcaggtcgcgtagtggacggacgcaagaaacagctcatggacctgcggggcggtatgccgtacacctacatgctggagaatttctttcccgaactgcgctccagcctctcggtggcctgctaccggaaacccgaaccgcccgtaaaagtcatttcccaaaaagagacgaaagtgaaagagccggaaccggccctgcaacccgatagcgtggcggaaccggcctccgagccggcaacggtgcggaaggaagcgaccgtgcaaccgcatagaccgacagtacagcggttggccgttaagaccaacctgctctacgatgcgatactgatgccttcgctcgaagtggagtaccgtatcgccgaccgttggacggtgaacctcgaaggcgacatggcatggtggaataatgacggcaagcacaaatgttaccaagtagctacaatcagcccggagggacgctggtggttcggacagaagcaaggcagcccgtggcacggccactacctcggcgtgttcggcggcttcacgtggtacgaccttgaaaacggcaaagagggctatcagggcgaggccgaaatggtgggtgtcagctacggctacatgttccccatcggacggcggctctcgctggaagccggtatcggtctggggtacatgcacagcaagtacgaagaatatcttcccatcgacgggcactacgtgtaccagcagacaaaccgaatgaattacttcggtccgttgaaactgaagtttgcccttgtgtggcggttgtgggataccgataaaaagaaaggaggcgcacgatgaaagcaacgctacgatataccctcatggggcttacgtttgcaggattgacattcctttccacgagctgccggaaagacctgtgttacgaccacgacgagcatggtctttccgtgaaggtgaatctctcttccgactgggaacaggaatgggaacgtacttacgcctatgactgggaaaaattgtgggaagaggactggaagtacgactatgaagatttgtgtcctgctccggccgacggaatacgtgtccaagtctataccagcgacggacagcgtatagagagcaatctgcccgatgaaggaggacggatcgccatgccggaaggcacgcacgaactgttgttctacaacaatgatacggaatatatcgtgttcgatggcgtggccgcttcggaatccgccacagccaccacacgcggcgtgacccggagttctttccatgaattgcacgcgggggaacgtaccgtgaaccagcccgacatgctttacggggcatacatggaagaatacacggcagaaaaaacacttgccccgacggagctgccggttaccttgcgtccattggtttacacctatatgatacgttacgagttcgaaagcggacaacaatacgtggccttggcacgcggagccttggcaggcatggccgaaacggtctatctgaacgatgggcataccggagaaaccgcagccacggtaatgttcgactgtacgctggaagattacggagcggaagcgctggtacagtcgttcggcgtacccgactatccgggtgaacattacggacgaaacggtacggacgggcgaaggtacagcctgaacttggaggtgagaatggtgaacggcaagttcaagaccttcgagttcgatgtcacagaccaagtgaaaggacaaccacggggtggcgttatcgtcgtgagcgggctgtcgatttccaacgacgaggggctggaaggcggaggcagctttgacgtagatgtggacggctggggagaatgggtggacataccgctgcccattgactgaaacgaataaaacaacaggtactaaataaccaaatttttaatttaattttttacatcttatgaagaaaagtttttttgtgcttggagtggctgtagcagcactggcaagctgtacgaacgaagaagttgtggatatgccgcagagccgggcgatccagttcggaactttcgtgaaccattcaacgagaagtagtgtgactgaaacaacggagcagaatcttcagaagttcttcgtattcggaaactatgatgattcatggacttccgtatataccaatgttcaggtagacggaggcactgtaggagcggaggggacggtttggaatcccacacagactgcttattggataaatggcaagaagtaccgttttggcgcttactccaatggtggtaataaaattgagaatgcagagtttaatgcaacctctcgagtgttgacattcccaaattactcggtagacaatacgaaagatttgattgtggctataccccaagaggtgactgcaaaagaagctaataatggtccagtaaacttatctttctaccatatgttgtcgcaggtgaagttcacgttcaagaacacggacgcttatgactacaccatgaaaatctccgacatcaaggtgaatgcagtaaaaacaactaatgttacagcgacttatgccgaaagcgggaaaccagatatcaattggactactcaaagtgtttcaacagaggactatgatttcggaacattaggggatattgccgaagactttaaggacgctacccacactacgacctgctttgtcattccacaaagcaacgaaaatctggaagtaacctttaccgcaactttctatgatgcagcaaataaacaattaagtgaaaatcagttcaaaggaaaattggcatataaaggcgatgttagcggcacagtacagaaccaatggactgaaggtttcaaatataactatacagtagaaatcaacggtagcacgattgatccggagttgaaggagcaggtaattgagttcaaagttattgatgtagatgaatgggctgacgcatcaaatagtgatgtaaccccggaaaacgccggagagtaatcgcttgcatcaatagccgaaaagacatcacatcaggctatgaggggttgaatgtcccctcatagccactaacgggagtgttgctccttatttacgctaccggtagcgtcagaaataaccggatataaagaaacaatgtatgattatgaataacaacctattcaaaaccttgttcataccggctgtcgcctgcctgctgggagcctgtacggaaagcacgggcccggacatggaaacaagcggcaacagcggggcgatccgttttgccggtcccgccgtgacacgggccgccatcgacgacgcggacggaatgttgaccgatggaaactcgttcagcgtatgggggaactacaccgacggaacgggcggtacggccacgagcgtgtttaacgccgaaaaagtgacatacgtttccggcatgtggggttacgagggcacgagatactggctccccggtaatacctacgacttctacgccctttatccgtctgtggaaacgctgggcgatgccgtgtcctccgccacctgcacggacggcacatttaccgtcaagggcttcgacgccacgaaaggacacgacctgatgacggcgaaaaagacgggtatctccgtcatggcaggccagacagagcctcccggtccggtagccctcaaattccaacatttgctggcacgcatcacctttgcggcacgcagtgagggtggcaacgccacggtacattccatctcccttgaggggctggatgtcaagggagattacgacagcggcaaggaacccctgtggagcaacacggcagagggaaccgtcagcgtggagaaagagacttccgtaaccccagccggaaatgcggacgtgtcgggcgacctgctactcattccgcaatcgctcacggacggggtgaaactgactgtcacctacgataccgatgccgagaggggaaagaccgcttcctacaccttgcctgccaccaccgtgagcatgtgggaggcggcgaaccattaccgttactcgttcaccctcaccggcggaggctatatcgtgttcgactcgcccacggtcaacgcatggagcgacgccataggcgggaacgtaaccatcgacgtgacccaataacccaattataagctatctgtaacttgacgataaaatgaacatccaaatgaagcaacgatacatacttccggctctcctgcttctctgctccgcctgccagcaggaggaatgggcgcagcccgaagccgacagtcccgacgccatccactttgccgccccggccattaccgtggagaaactcacccggagcacgttccacgacgcattccccaccggcggcacgttcggcgtactgggctactgcgtgccttatcagcgtggcagtaacaccgaaaaggactgggcatcgggcagcgcgaactggggtaacaagagcggcaacgccttccccgacgtgttcttcaatcaagccgtcacctacaacggctcggcctgcacttatgactataataacagtggcggcccgcgaaaatggtacaacacgacggaaaatccggcggcgacctcccccgacagctatcggtacacctttttcgcctattacccgaaggacggttttacagtggaaagtcccgccagcgccaccacacggggcgtgccgaaactgacgttcaccatgccgttcggcgagacgggcgatgtagcgactaccacgttgaacgacatgcagacacccgacgcgatggtttccgtcgtctataaccacctgcgtaccacggggaacgtgggcttcaatttcagccacatcatgacgggcttgggcttcgccgtgaacaactacaattacggagatgaaaagaaggaaactgttaccgtcaagcgtgttaccttgtcgggccacttcacccgctcgattaccatcgatttcagcaagaataccaacgaagagggattctacacctacagcggcacctatcccggcacatacgagatatataacaacgagacagggcttgcagtagctcccaacagttccgtcagcccgataggcgacaagcacctgcttctgttgagcaacgccacggacggcacttatttcggcaaggacgtggaggtttccgtcgaatatacctacaaaggggcggataagaccgctacagccgaacgtccgacacagttccagccccgtgcgggtgtccgctatacggcgcagctcaacttcgtgggcgaaaccttcgcgctgaactttattgccgccgataacgagttctgggaagacgggggcgacagcgacgtctctatccaataaaacaacaaccgaaaacagcataaagatgaaaaagatactttattatttcctgccggtggcctccatgctcttgccggcagcctgcaccacggaggaggactttggcggcggtaccgttccgcccggcgacggattcaccatcgaggccgtctgccagaacatgctgccgcagcaagtcgtcacccgctcggccatcgccaaggacgacaaggagaagcgcatcaaccagctctacctgttcttcttcgacgaaaacggcgactatctggaatcgagcaacacgaaagtattctcgccgtatatggctccgtcggcgaatacgaccaatgtcagcattcctacggacgtgtttaaagatccggcattcgcaaaaaaaactaccatctacgctttggccaacgtgactccggaggtggtaactgatgccaacggcgacggttatcccgataatttcccccaatatagcaaagacgggaaaaagcccaaggagctgctcgaagcgttcgtgtacgatcctgccaattatactcctaacacccgcgatgacatcacgaccctgcccagcacgggaatgccgatggcgggcaagagcgcgaccgtgaacctcaccgagaagggaagcctcacgatgcagctcaaggcactgatggcccgcatcgacatcaacatcagtatcgattccgaccactcggacgagagcggacaactgccccgcctttccattgcggaatggggcgtgtacaacatgcctaccgccgtacccctgaccgagcctgccgatggccagaccagcctgactaccgatgagccataccgcaatgtagaaaacatacagagcgatgccgtcgtttacaaccacggcggggccgcctccctgaccttctacatgttcgagaacatgattgaaccggacgaagatccggaaaactatcagtatccggctggagtagaggacgatgttgacaagcagcggtggaagccgagacttgtaggcgaaaacagcaaggctacctatttcaagatgagagcctactacactacctataacggcgacccctccctgcccgcaaatcaggataacaccaccatcgaggccgaatataccttctatctcggaggcaacccggtgaatgacttcaaggtgatacgcaacaggcactacgccaacaacatcgtcatcagcggactgacccatgtgggcaacaacccggaccacatcaccttcgatgcccgcgtcaacatcaccgagcagaacaacccgttctacctgtccatgctgcgcgagcgtgaccacgacgcccacttctgtatcacacctttggacgtgtacctcttcgaggaagatgagaatccaaagatgaaagtcagcatagccgacccggaaagtcacacttggatacgcatggaacgtgtgccagccgaaaatatggagaatggaacactctctgccgacatgagtacagatacccatttggcgaccggacagaaatggactgcgggaaacggcaaacgcaaatacttcaccacggacttggtgaccaacacccttgcccaaaacaccgaatacaccatcagcaggagccgtgaccgcatctatttctacttggacgaaaacctaagcacgaaagaccgcaccgccaccgtcaacatctcgtacaccgacaacaacacgcagacgccacgtacccgtaccattgaaatcgtacagcacggtctgttgccggtacagtggtattatgaaggcagacttcaaggcactatctacgtggaagcctatgaggaatatatatcccattacgaccccctgaacgagtttgaaggggattatatctatgacggtttggaatggggttgtaatggtgaatacatcggaggtccgctaaataacgaatggacggaaggaaacaaacatggggcggcagctacccggcgcattattacccaagctggacaatcagaaatgaacctgaacgaaaaaccccgctcagcggcggaatattgctataacaagaacaagcgcaatgccaatggagccgtacagggcatgagcaattcttccggttggttcctgcccggtatctcccaactggaaagtattcttacctcttattacaatacatacacggagttccagaacaatttctactggtcatcggcggcagcaaaagatagaacaggaatatggcctgcgtatatctatccagagagcaccagctatgcccgtgccaccaaggccctgccagacggtggttatgcagaaagtgattgggacgatatatacacgaatgataacggcactaccggtaaagcaccccgcatcaatagacctctccgcatccgtgcagcctacgtaccgcccagtggcgtaactatccagtgacaaccgccaaactttaattccgtgtcttactcactgcccgtctgtaggaaacccctctacaggcgggcagtgctgtttttattctcccggtatgtctttggcctgtacaaccgacatgcacacgcacgttttatacgtcggtcgggatagaaaaaggtgtgacaatatcaaaagaacctattcaacaaaaagaggtttgtagcctccccaaaagcccctcaaacctatggcaaaggcatcaaggggcttttcttctatcagcgaaacagtaatagacatttgggttcgcgttatctgattgtgtcgtccgcaaaacaccttcggcgtcggaactttatctgtcatccgacagaaatacgataataaatataggatttctttaccgctttttatttcttcttcaagaaacgttccgtgagccatttgcgcaccgggagatcatagcacttcaggcaggcataggcaagcgcgaacgccccgacgaacgtgagcagcatgtaaggaaggccttcggcaagtgtcgcctgacggttgaacgcccatgccgtataaatatagaccagcggatagtgggtgatatagacgggataggatatgtcgcccagaaacttgcatacggcagcggagcgtttgcccgttatcctgcctcccgctcccatcgagacgataaccgggaaaatgcagatgatgcagaaagcctcgtaaagcccgttcatccaatacccgtcctccccaccgatacggggcgcggaaagcacggcgattatcatcaggctgcaccacccaaaagcattcttgcgggtgcgtatcagccagccaagccgggacaggagcagtccgccgaagaaggggtacatcagccggaccagtcccacgtactgctgttcccagttcaaagcccatccgcccacgatgtcgccggcaggtgcggtaaggcagcggtgtaccgtgaagcacgccgctatcgccacgaggacagtcaatgccgtcttgctgaacttgcggatgaacaaggcgtacaatatgttgccgatgtattcgtagtaaagcgaccatgccggcccgttcagcgggtgcatttccatccatccccggacgtcccacttcagcggcagaggcagcaacgtacaacccagcagcatgaccagcagcaccgcaccggcggacacgccctccattgccggataacagggggcatcctgaaaccaaaagagcgcggctcccacgatactccccatgaccaccataggctgtagccggataagacgacgcttgaagaaggttcccgtgctcatccggttccaacggtcatcgtatgcgtagccgatgacgaagcccgaaagcatgaagaagaaatctactgccagatagccatgattgataatctggttcagatggttgccgccggagtgcgcttccagcagatgaaaggccactaccatagcagccgccacgccgcgcagtccgtccagaatctcgtagtgcggcttcgaggtcaaataagagttttgcatgttcatgaattataccggtaaaagactgaatgcaaagatagtatataataaataattacgatgttcgttaccgattagaaaatatcaaacagtcagatttccgtttaaaaagagagccgatcttcacagacaggctctccataaacgaaaaaaaatgtttttatatcgtatgaacaaaaagtattatttgagatgcagcacaacctttgtatggcggttggcctcattgggcgcataatcggaaatgccgccttggtgagttttggttatcttgtcgcccgacaccccacgtttgattaattcttcagcgatataatcggctcttgatgcactcaagacattgtttacggatgctgttccggtcatactgtcagctgcaccaatgacgcttaccgataacccgtacttcttcgctactcttgccaactcgtcgagattaagcgtctgggaggtatccgtgagacgcgccgtattgagttggaagaagaaatacacgggtgagccgatacactcttttccgttctgcatacgagccaaatattgcatacagagtgtgtcttgacccgcacaaaggggaattgtgtcggcagattgtgtacccttcccatccaagggagatttcccgtcccacttccggttcttaagtctcgcttgaagcgagttcagaccgctgtaattgtttttgggataacggttgccgtcgaatgcatcgtcgtcatcaaaaagatggctgtacttgtcgagcaatccttcgatttccagaatctttttcagctcagcgagtgcccgtcggtctctgtcatgctgccctgcataaagacggttctcttccgacaaagcatttacgcgctcgacaagccactgatcgcggcggatataaggacttgggtctatggcgcgtttccaaccgaccctgccgatatgaaaagaaaatccggcggtaagcgataacatgtggtcaccaaaacggttctccttaccatacccgtcgaaatcttggaaagtggttgcgccggagagttccacgagggcgcttacccttttggaaatccggtactgcccctgtataccataagagactgcaaacgggttatgcccgttggtcgcatgatgcagcagcccgataccggcaaagggagccagatgccagcgtacctgttcctgacgggaataactgccgccgagcacattccatagcagatccgcatggaggtggtggtattcctgcacggccagcgtaccgtccttgaactgcaagccgctataatttatgcgtgcgcctacccacggggtgaaccacttgccaatggcaaggctatacgagggtttcaacctcccgaacaggtcttcgcagccaagcggggtgccgagaaaggccgtcgtgcctccggcgatactgacgaaccagttgccgtttccccgtgccgggacgaccactccgtcaagatatgagggctgtaacggctgcagcagttcagtgtcatcgtaacggaacatgcagcgtacagtatccttctccgtgggttgtacatccgcacgggcttgcagcgtacagaacgccgcaaagataaagatgatattctttgtcataattccaattttttaattgtaatctattcagttttcaggcaatctttgccatttatcgtttgggctttttgccgatggccggacgcatcatgcggctcgccattctcatgcagcggagcgcccatgcccggttgtcctcgtcgtcatcgcgtccccatttgaggtcactgccgccaccacctccgccacgtgtttcggcaaatgtagtggcatcatcgaccatgccgaggaacaacagtgtggcgcagtgcatgacttccgtgccttgttctgccacggagcgcacgagggtgccatcgaacagttgccgttcggagggcttcatacgtgccgacagttcccgccactcatcgaccatgttttccagcatggcatccttgagcaggctgtccactttggaatgtacatcacgggtgtattcgtaggcttcttccttaagctgttccgtgcgttcctgaatggcatccatattctctttgaggtcggaaagctgtcggtcggcagtctgtaacttctcctgtttgtctgccagtttcccttggatagcgaccagttctttttcgagtttctctttctcggcggatatggccaaggcatcgtcttttcgggagttcatgtcattttcgagtgctgccagttgggcctccttttcggatttctctcgtcgcaggttttccaccattgaagtgagaccctttaccctgcgctctgccagccgtatatccgaatgaagatcggaaagcactttttggtggcggtcaatattctcctcgatagttgtacactcttccgagagcatacggcggtattcttccgtcgtcctgtgccgtgcgccggtctcggcgacgctccggcctctcgccattccccatttcgtgttgacctcggcgaaaaagtccgtatggagctgtttcattctcgcactatattcgaacttgtcctttccggcgaatatctccttgtacgcaaacttcccgtctttgattggcagaagcgtgcaatgcacgtgcggattcaactcgtcgaggtgtacaatgaaggcggcaacattctgctctccgtatctgccacaaacgaatgaatagacatcctttgcccaacgttcgatgtcgctcttccttttgatgctggtattgtccgcacctttttcaaaatccaccttctgcgtaccgaatgcgagttcgtgcatccgctcccgcgaacctccaaagatgatgtttaccaccgtgcggtatttcggttcgatcagtccctcgttggggtcctttattccgcgacggcccaatatgtccgccatccgttccgggatattacggctcgtgtcaatagggcgtatcttgcctccggacgcaatctcgaagttcagatgtttgcgagtgggatcgtagttgcccttactcatggcgtacttctctgcctctttgctgcgattgcgcagatgttcgttgccttgggcggcggtgattcctttcgacacttgaacgtcaagaacctgttttgcatttgccatactgcttccgtgttatttcggacaatcccccgtgtcccagcttgctgcttgtacggacacccttcccaccgacgaatgtcggtcggggtattaggctcccccttccctttgttcagtggcagacgggcaagcccggatgcctgctataactggaaggatatttggaccggaaccggggcaaattacccgtggttatacaatctttgtctgcgaatccctgttcaactttcttcctgcgccttcgctaaaagcgatagaaagggtttacgaagcgattcgaggcgttccgtctcttcgtccataccgaaatccgttccatccggctttccgtcgataacaagctctgcaagctctttcgaggcttcgatgaacgccgcccattccccaccgagatcggaccggaagaactgcacgagcggtgagccgtcgtcgaatctcgacttgcgcagaacccgccatagggcggcatgggcgatacactccaaaacggtctcacgcaattgttcttctgatcggagggtatgcacggatgtcgtgccggaatggttgtccggataggcccggctgtcctgtccggttatctccgccaaggtctgacgcatgatttgtccgcatgatttgccgacatcgaaagaagttgctttgccaatcacccaatcgtacaatattccttgtattcttgtggcaaagtccgtttctttctgcccactgtccggcatgtcaggcgtgccgattcgcaggtgcatggtaatgatgacgcttttcgccagccggatacgttccaactgcccgaatgcttcgagcgtgtccagaaacgagcggacggtggcgcggtgccaatgccactcggatgcaaggtcggaaacggtcacatggcactggcagggaccgaggtcgtagtcttgtttccttaaaaacggggagacgaaacctgccagcgatttatccaacaggtcgcagtaggcttctgttcttgttttccgctcgccgactttttctttcagatagtcgaacacttccgtgttggccagtatggtggcgggtgcttcatttctatttctcattttcgttctgtttttgatgattcatatcgtgcggattgtatggactgccattatccgcattatcatggcagtcttgcgtgatgatactatgataactgtcggctaatgctccgggatattccagccattcgaggaatttgcgcatgtctgtcctttcggacatgacccttgccgacgggtagaacagggcagccaaaagaataaaggcgatggttacggacatcgtgtacagatgcggcacgaagccgatgaccaatgccaagagcgcaaaccagacgaaacgtttcggccggtcgagcaaacagcgcatccatcggtccgcccgccggaaagaggcccatgcggcacacacaatggtggatggcacaacaccgaactcgccggggtgtccgctcgtatagacataatggaagaggagcaatacgataagcagcacatgggtgtacaacctgcgggccttttcgctccatatcattttatcgtagaattttgccatgaagtaacgtctgctcctgtacaacagtgccggaaggacgacaggcattgcaagaaacacaaactgtaatataatccaagtcataacaggtaatagggttttgaaggtatgtgaacgggccgtaccacgagttccaagcggacaatcccgtgggtggccaagcggataatgttctcggtgtcttcagctgtcagggacgatgcgcctttcttcatccgggacttgaatatgccgttctgcttgcggtatgtagccagtgccgcgtccagatcatgctccggaatcgtccacgtcatgccccggtcgtatgtgccatgcggtttgcaagcacgcagtaccagcgtgcgggaaaccaggaaatcggtccggttgttcctcggaatgacgtgctccttgtagaggttgtcatcggccacctctatccatgtgcggtatgtgtcgatgcagaaaatcatctggcgatatatcgtgtttcgcataggaactgttttacatgaaatccaacagcacgtcttccagctccttcttgtacttgaagctgccgtttccggtgtggagtttcaagtcgagagacaggtcgccgtacatcagttccaacgaatcgtaaacggtcgcgatgacgcggtttaccttaccgtctgcgtctgtccgggcgttcatcttgaacatttgtccgaaagcgggattggagtaggcacaggtgctatgaccggatttttccaatccgaccggcacatggtggtagagcgtgatcagctccatgtcgtcctcgaatatgtccatgacctcctccaaatcataggggtcccgcaacgggaacgtgagcagaacgtagtcgccgtaaaactgcggttcctccattgtcgccacattgagaagctgcggcatttgcaggggtacgaacgacataaagtcatccaaaaagtgtcgtaacataatcatatatcgtttattttgtgaacaggcttttacaaagaggcgatgaatatctccatgagcataccgggcagctcgtccaaccggtttctttccgacggcaggattttacgcagtgtctcgaaagcgccgggtgtctcggtcgcaatccggtcgagggctttcttatcctccggagagagaagcgtcatacagaggccgtccaaggaagcgtagggctggagtatcatccaaatgtaggcgtgtgcctgttcgggtgttgcgacttcgccccgatgtatgtcgtcgagacaggtacgcacgttctgtatcagtcggcggtcggcacgcagggccatgtatatcagggcctccttgtaggtaatctctttgcgtccggcggcgagaaacacctcggaacagcacttctccgtgtcgcaggtaatgtcggccatgtttgcactgccggaatcgtgcagaccggacagaaaagcgcgaaaaacggcgtcttctttctcgatgaatctcttgaggtcacgactgtcgtgtatgccgtcgttcagggttccggcaagcaacttacgatatgccgacagcgtttgctccttgttgccacggtaggcaggccgtttatccagtgctgcgaaaaacggacggatctcctcggcggaacggtgcagttccacgtctccggcatagggagagaaccgctctttcaggctcaacacttccttgtaggtgcgcggtttcgacagggtcaaccgggaaagttccgagcaaatggaatcgtgtaacagacgacattcttcccgtgtgccggaatgggtctgacgggccgtgtcccgccgaatggctgcagccacggaatctttcaaggtttgccattccccgatacatacggtcagctcttcaaaggaaagttcttgggacttgcgtatctcggagaggtactctctgtacagaccggcaggcgtgtcttggggttccgccagtgatttgccgttcggaccgtcgcatgacgggaatgtgaaaacggcaattgaagcggcagaaagtccagcaatggaaagtatgatttttaagtatgattttctattattcattgttcaattttgaattttacagcgcaaatctaagtattattttcaagatggcaagtgttgaaatttgttttataagctatttttaacattgtacttaatagtttgattttcaatgaaaacaagtgaagaaaacgggaaaatccaagtgctttcttcgattttccactcaaagtatggtttagtttaaaataaaactgttatatttgtacttgttatcatagaagtgtacaattagatggcaaaagtaggttacatatttaaggcggatcgttacgacgggttcgaggctgacaaagaatggatgcaggagtacggctgtgtacaagtgatagaggaaccggtcgaaagcgaggcgctacggcctaaatggaaacagcttgtggcgggcctcgaaaggggcgacgaggtagtggtggccaaattcagcaatgccctccgagggtcgcgcgaactgtcggccttcattgagttgtgccgtatcaaggtggtacgcatcatatccatccatgaccggatcgactcacggggtaaactgtttcccgaaacgacggttgccgatgtgctggagatgttcggggcgcttcccgaagaggtggcgatactgcgatattcgtccgcacgtgtcttgaacctgcaacagaaagcgaagattccgaagaaaacgatgaaggctatggacaaggccgacaaggaaaatactatcgttgacatgtatgtcaacggccattcgtttgaggacatcatggcggtaagcgggtacagcagccgaagttcggtgttcagcgtgctccacaggcatggggtaaaactcaacagggggaaattcagcggccccttgggaacccggaaaaagaaaaaggacgacagtccggcggaagaataacccgtaaaacgaaaagggtggcggcaactaccgcttataaacggtttaactgtcggaaaacgaggttgaaacggattcgcactcttggtaacaaacagcagatgtttaatttattaatacagattaaataaaaacgtagtatggaagtaatattgataatcgttgtgttctgggtagtgggtaaacttctgaaagcggtgttcggcggttttagcaagagcgactaccggcgcgaccagtaacacgtatgagacaacgacggcattgtctcgccggttctttcgtgccaggagtcggaatatgattcgtataaatcaaaagatgaatgtagataaatgaaaacttaccttatcttgtttttggctatcgtttttgaaactgtagccacttctttcttgaaacagagcgaacagtttaccaaactcgttccgtccgtattgaccgttctggggtacgcggcggctttctattgcttgagtgtcgtactgaagagcattccggtaggcatagcttacgccatttggtcgggagtgggtatcattcttatcgcgcttatcggctttttcgttttcaaacagcacctcgacctggctgccatcatcgggctggtcctgattattgccggagtggtcgtcatcaatgtcttctccaactcggtctctcattgatggaagtgtcccgtcattgtgttctataccaaacgaaaagaaagaaatcatgtttttcatcagcatggtttctttcttttttcagcattataggaaggagtcaaatatatacattcaacataagatacaagtatgccttttcgtccttactgttatgatgttcaagttcgaattgtaccttatcttcacgggccaaccagccaatagcactacccaactcggcatcatccatccctgtaattttctttatctctgaaaattcccatttacggagatggtcactattcaataaacgccaaactttaccagcgttctcgccaatgatgtatttatccataaattataatatatttattgttatatgtatataatatgttatacaaatgtacagttttgataacgaattatcgtttatgttccattaatgtttattaatacatcatgcatttggcggaatttttattccagataactgctcagaatgccgctaccaatctttaaacttttttaacagcggcattttacatggaacctaaatccgaaaaaattgcctgcaaattatggcacgttgccgggaatatatccaaaatgtaacgacaatcactaaagtcgtcagaatttcagacaacggtaaggcgagccaaattccttttactcccattatggcaggtaataccatgaagcacggaaccagaaaaacaaatccacgtaagactgcaaatgttatggccggctttatccgttccatgctctgataatatccaataatggagagattcaaaataaagaagatgaatcccgtgccataataagggaatccttctatcgctatgcgtgcggcagtattgtcaatgcgcaagaatagtccgacaagcaattcaggaaacaggataaaggcggcagtagaaatgactccgcaaactaatgccgcaaacacggaaacgcgtaaggcggaacgaactctttccgtgcttcctgtgccgaaattgtaactgataataggctgggcagattgggcaatggcgttacctatcatgaagacgaacgggagataataacagcttactccgaaagcacctactccgtcatctcccaaatggcgcatgaatacctggttgccgatgaacagcaatatcgccattgtcaattcgcctaacaaggcggatgagcctatcttgcactgcattcctatatcatggaagaagaataaaatcctttttctacccggacggagagaatgcaaacgagtgtcacgggcatagaacaacaagtaacccatcgtcaccgttgccccggccaaacaactcagggaggtagcaaatgccgcccccatcactccccagcccagcgggaagatgaacagccagtcgagaacgacattcaccgctgcggctatgatgctgcaccacatggcgagtttcggagcgccgtccaggcgcatggcaaacaaggcgacggcaatccacaactcgaacagcagagacggggaaaaccagaccagataatcgacaaccagcggcagcaaatgctccgacgagccaagcatacgggcggtttcttcgggaaacgccagaatgaatcctccgacggttacggatatgagcgtcacgaaaagcatggcttgggtgatggtcgcacgtgccaaaacggtttttcctttcgacaagtaaatggaagcgattacggaacaacctgcccccatcatcagtccaacacccatgagtgacatcagtagagggacgcagatatttacagctgcaatcccgtcgctgcccacgccgtgtcccacgaaaatcccgtcgatagtcgttaccgccgacatactcaacattcccaacagagtggggaaaaacagtttcttaaacagaacggaaactctctcattcccaaaatcaatcactttttctttcatacgtctttgtattttatattatatggtttacttccggcagaaaacgacggaagccggataagacgatggttttacccagtcatcttatccggcttccatagccctccgatgaggattataaaatgtcctttgcgttatttcgccgcaaaggtgggccaaagatttgacttatccaaaaaaagttgcatttttgtacattgctatttaattcttatatatgacaaaagcagaaattgttagccggattgcacagcagaccggaatagagaaagaggtcgtaatgaccgtggtcgaggcattcatggagaatgtaaaagatgcgatgattgccgggaacgaagtgttcctgcggggtttcggtagcttcattatcaagcaaagggcagagaaggtggcccgtaacatatcaaagaacacaactattgtgattccagctcattccatccccgccttcaaaccggcaaaagtattcctgagtgccgtaaaagagggaaaataaaggacgtgtaaaagtttcattttattttgtagatttgtatctattagcgatttaagagggattaagtttttagtctaaaagataatacagaattgttatgattaaagaattgagagttggcaattacgttgcttataaaggtaaaccatctttggtttgtgcattggattatgatcctaagttgagaaaagagaatatatccgttgtttataaatggggagaacctccgtataaaacaaatggagacattcagccaatattacttactgaaaaattggttttgcaatgcggttttaatcagcttgacgattatacatttgacaatgatgaaatggagattacacaagactgggatgatcaaactgtatattacattaccactcatgctaatgaatatacggtaagcggacaccgcatagaatacttacaccagctccagaatgcgtatttttgtttatctggtggaaaagaattagaagttaacctataaagaaaagaggcttttagaactgcctctttttctttatatcatgcgagggtattatatatttaatccgtcacctcccagtaatagcttaactcgttccctttcagattctctttggcgtattggtcggcttgttcccaaagagtattgtaaagtaccgccatatccggtctgttttcatagtattgccatatcttatggttaagtaccaatgtcagttccgtcaagaacttatagtcccctttccactccctgaaagcccggttgaaagtgtccaaaacagccgccaacccaaatctgtccgctattgagaagtcttcccaaaaggttgtttgtaactcataaccgttctcttgcataaattctttaaatgtcatacgctctaaattttaagtttgaactattttttgtttttccctttggtacaatcctgtaccgaaaggttgattatttttctgcctataggattgacggtcggtccaggcaagaaggctgcgaaaaatacactctccaacaaagtcggggaggaagatttttcgacagcaagcgtaagcggttcttgacaggacagacaagcggcaatcgaactttgcagaaaaaataagcgggctttcggcatggagtgttgggaaacggctgtaaggaggataaaacgggggaagctaaaatgttataaaaggattactttccggctggatagtcacggtacaaaggggaacggaccgcgtttcgataaaagggaaagagccatgaagatataaagggggaattccggcaaaaggattcaggacacatccattgtcaatgtatcccgaacctgcaccggtcattatctgtaccgaatgtttaggaaacccatttgtaaccttcgtccgtcagttcaaaatattcgtccattcccggtttcacaaaaaacatgatttcaaaggcttcgttgcttctaccttcgggtatcgtcatgttgatttctccattgcgggctgttcctcttcccgtattgaaacctaagtcttcgtccgcataggcgtaatggaattccacatccggaaatatctcggaaagtttttggataagcagtggcactccattccatgccgtatcgaaccaaagtatgttcggctcttcaaagtcttggtgataggcattccattttgtaccccatgtggcggtagaccactcgtaccaagtgggataaccgtactttttccgattttccaaatacgatgctccaagttgcagcgcttcttttctgtccttttccgccaatccttctatccattgaatggttctcaaagcatcatcgtccaataaaaaatagaatggcttcaactgcattgcttcaaggtatttcatacccaaatctccactgctgcttttttctatcaacagttcttcaggcataggaatgatgttgttgaagtcgatgtaacaaggcgtattgtcatcatcggttttaccttttaagaaattcattactttttgtactgtttcccggtctgcgtttatttctaaacggtttgtcacatgattaggcataatcttagttttttgaaattgttaatacttattttcccttttgtcggttctttcttcctgaaccgctttggggttttacggatgcggtacacggctgtcgggaaaacttcatacggtggctttccttggaaaattactcttaccccggtaaggaagaattttgcaagaaatgcacttcaagccaccggatcaagtgcgacggcctacctttgcatctggtaaaaccaaaccggtgatggaaagaagaaaagacgggagatatacgaaagaccggggtcggtataaaaggcggatattgctccgtgagtagtgataaaaaggaatggagctgattataaaaggagacggttctgtgtttcgcccattcgataaaggataccgcaaccatctctggcggatgcgttgcggtattttgtggacagcattttatgcggccttgtccggcttgcgctgccttgttttccagccgtacacggcggctacatacggatagagggaacgtgttctccggcggaaaccttcttcgtcgatttcacggttgtaaatcttatcggcgatacgctccgcttcatcacggtctttggcgatacgatacaaggtgtagttcgtaccgtcatgatggcccatccgtccgcgaatgttatagccgtcgccgtaccattctgcatcgtcgcactgggatttcaaaatatcggcaatggtgctgcccaatatttgatagccttgtctccggccgttccataatcccaagttgccgaacacgacaataatgccgtccacttctttattcagattgctccgttcgtcgtccagccagcgatatacttcttctgcccattcttcatcgctgacctcgtaacagtcatcgtccaatatttcccgttgtgaattttgatagtattcttttgccgtttcgtccaacaggtcatagcttgaccaaatcatctgtttcatacgtcttgaattttaagtttgacttttgtttttttatccctgccttcggagggtttccctcgtccggcgggatttgattttacgtgcggaccacaaggcggacagaagggaaacaaggcaaggaggaagcggatagtcctatggacgatttcatttgtgttgaacaagtattgacgagcttgcgagttgatggttgttaacctcaaatgaagccgcgccttgccggttcccgaccgccttaactttgcacgggaaaatcaatggacgacggcggactcttcgtgtggagtatgaaggagtataaaagtatagacgttccggaacggtaacgagcaaaacaaaagcggccttcgggccgctttgtctcaaaaaggcaggaattacttcttgcccttcttcggtttctttgccggttccgcaggaacttcctcctctttatcgacagccggataaaatttgactgcaaccgtcacgatgcggttgtgcagcacgccgtctttgtcggtccattcttcgggtttaaaatagccctccacggtaagcagcgtgcccttggtgagctggtcgaacgacccggtattctcgttcttgcgccacgcttcaatgttcatgaaagcggatatacgcttggtatcttcgccgttcttctcctgacgggccactgccagcgggaaacgtgcgacacttgtggtggtgaactgacggacttcggcatcttttgccacgaatccggttactgcgaaattgttctcgatctttttcattgcgattgctttttgaagttaataaatcagttttacggtgcataaaagtaggtgcagtaaagggctgcaccaaggatagcgcataaatactctttattttggaggcgaagccccaaaccgcaggcccgataaaggaagatttgtgcgatacgccattggtcaagaccatcgggtcgcgcccgtctgcatactaactttgcaacgaaaaacgatatggcgacttcaaatagaaagcggtcgcgaaaaagtcgaggcgaaacaatccgcagcggactcggaaacatgaaagacctgtccgtccaccgacacaagaccgctcccgttccggcaggtgggcgggaagaacatcaggcgagaaagtgtatcggctgtttggggttgaagcggcaagaacgatataccgtttaacaaccatatacgctgcatcgtggaaaatactatcggacgaagatccggcaaaaggcgtgtgcgacgtatcgatatcgctgtctctatccggcaagagaaatgagggaaagaagaggtaaaggaaaaatggccgaagtctgccttgaaacaaagcggagaagccgcctttgcatgagtggccgttcgatataaaaggatatggcgcagccgaaatgtataaaggggtatttccgaaggaaacggtatgagtgtctgttcggaaataaaagagggtatcgcacccgcgtatctgttttagattttagccggtgtaaccgggctgaaactggtactccagcccgtactacatttaccttttttctgttttggtctgtaattctaccggctcgtcatcccatgtcagttctttgccgagaagtttgtaaacagtccctttggggagttctatctcgattggtacattgtacacttcttccaaatactcccaatgcccacaccggccccgaacgggcttttcgggcataatccattctgttccgtctttatttactgccaaccatgccataatatcacatttttagtctgttccttagtagtaattttattcttcttgagctatcattctcttactgtattccaaaattttatccatcgtaagccactccggtttttctccctccttgaagctatcatgcagttttatcataaactcaatttgcaatttttcgtcgccagcccataaggttttggggtgtctgttaccgtaattgaggtaatactcgcagtctgaccgtaagcggtctaacagttggtatctgaaaaccgaatccctgtgtattacttcgtctaccgttactcttccatttgaatttgttacatcgtttgtcataacctataaaattttgagttttctttttccctcttgtagcacctgctactttcgggcctgatttaattatgtcgcctcgaaaggtgtcatagctctttatgcaaggtttcacgattaaatactacccgtgcgaagcggagggtggagattttgtcgtgaaccgtcaggctttgaccttgcatacaagaacggcatgacaagtacctttgcgacacaatttatatcaggcagcccgaaagcgatgtgcgaacacagggaagagaaggtctcgtgtaaaaggttgatgggcgataaaaagggtttgcagcgaaaagagaaatataaacgggtattccggggcagtataaaaattgatcgtgaggataaaagggggattgtgccagcatgtctattgcgagaaagaggaacgggctgaagctggtagttccggttcagcccgcaaagcgcattggaggtcttttgcctgttcctgtcagaaatgggctaccataatccgatgtttgaaaatcctgtttttatcgctcggtcgccgttgctttatccagatatggtgtgctccgtatccgaatatgaaatagtcgtcgagcgtggtttcgttcttcaagcgttccatacttgcccgaagttcggtttcgtcagttgcaaaaagaatcgtgttcatgattcggaaatagatttcttccgcttcatcgctatagcggcaaaagacgtgttcgattgttacgttcatggttctattggtttgattgaggtgtttcgggtacattagtcattattgattctccgtcttgattgaaaatttctattgtcgggttgccgtcgttttcttcggggagcatagattccgatgtatcggtcaatgcttgccactcttcatagcaaagacggttgtcaatgatgttcgacacgtcctcacagttccatgagcggacgattgcctcggcttcttcataactgtccgctttcacactgaaataatcccgttcccaacttgtaaccttacggtcttgataaaatttgtattctcccatatccttgttgttttaaccgcttacttctacaatatcctctattctgccgtacagtatcgagcgtaacgctgttttgtcaatcgcataatactcgtgaatacttccgtgctgtttgacgaaataccgtttgaggatgtcggaaaagtcaaagtgataaccgctcaaggcaattccacgtttgaaatagatactttcccatacgttacgggtaatccagttcttttcttcccggtttaacttgcctccgttgttcaggtgtacccgcaatttgtaaaccttgctgtcctgcaatgtcgccagttcgggaatgtcccatttgacgaattttgttgctatctgtgtcatacgtttgctatcgtttaatcatggataatcacttcatcacggtattctgaaatttccttgccgctttcaaggcggacaactatggtattgccatagtcgcccacgattgtgccttccatgtaacctttatatggattgagcaacgtgcaggacaaaccgataatatcgctatcttcttcgtattcgtacatagtgaattgtgtttaggtttaggataacttaatgttccatttaccttgcgagaatatccgaaagctcacgtattcgtcctctaactcgtatgtcagtatgcggatatagattttgtctttggctgccaataaggctattaattcgttgattgctttttccgggtattcccagcgggaatcaaattcggcatctaccgtgtcgccataccggttgacaaagccgttgaaattatcgtccagaaatgcctctatcttattgaggtcttgtttgttttccgtacttgcgtggaaaatgtttgttgcgtagtttgccataactttgaattttaagttttcttttttccctcttgtagcatccagctactttcgggcttgatttaattatgtcgcttcaaaaggtgtcatggctctttatgcaaggtttcacgattaaatactacccgtgcggaacggagggtggagattttgtcgtgaaccgttaggctttgaccttgcatacaagaaagacatgacaagtacctttgcgacacaattcatatcaggcagcccgaaagcggatgtgcgaacacagggaagagaagatctcgtgtaaaaggttgatggtttataaaaagggggttgcagcgaaaagaaaaatatgacgtggaatgtttttttcttttggctgtacaatgggaccggagtgttttacgaagttcgggaaaaggtttagtttagtccattagcctatatatatgctaaatcaaagtaaactatatttaggcagccaaatttgcctgcctataagtttttccttatctttgtatgaactaaagaatacttgcttttttcttttggctgcagtggttcttggaagctcacatgcaaccatcggacgaaaaaaatctggtgggaagctgttcaagaagtcccgattataagcaagtgcaaagaaagaaacagagtgaaaacaaaaaattgggaaatacctttaattaacgattttgtttcttgtttgttccttaattaaaatcgtgaaattttcaacaatctgattttcaaatcattatataaactatttttgagagattgaatttatttacaataatcatacaggtctggctgccaataaaggttattatgaaggtatggatattggtgaaatatggggatatcgcgcagacgatcttttcctgtcgaaccgtgaaattgatgattacctgagaaatgtaaatctgacagcgttcaagtcgaatgacctttggcgtcgcggtgacttaaaatatatcgattccaatggggatggtagagtagacggtggtaaaggtactttggctgatcacggagatttgcagattattggtaatacgactcccaaatattcgttcggtatcaacttgaatctgggatataaaggttttgaagtatctacattgttgcaaggtgtggctaagagagattttccgatttccggaagtaactatatgtttggtggaaacaactacaatttcaaagaacatctcgattatttcagcacagagaatccgaatggatacttgccgcgtctgaccggctggaaggatgacaaagactttttggtgaataccggatataacaccacacgttatctgttgaacgctgcttacatgcgtatgaagaatctgacggttgcttataccttcaacaaaaaacaactgaaacatattggtatcagcaatctgaaagtatatgtgacttgcgataacttattcaccgtaacgaaactgccgaaacaatttgatccggaaacactgaatcaggtgaatatgtcggctggcggtgatgctcaaaatacggctccgggtctgacttctcctatgaagcagaatggtaacggtatggtatacccgatgaaccgtaacttcgtattcggacttgatttcaccttttaattagagaatgacgatgaaaaaaatatatatattattagtggttggggcaagtttcatgatgtcggcatgttcggacttcctggacagagagcctttgacaacacccaatagtgagacattcctttccaatgcaagtgccgtgaacaactatatcaacggtttgtatatagcacttccttctttcgggacttacgatatgggagttcgtggagaagagaagaacagtgataatatcgttgcggaggtttatgacaaacgtctgaacggagaattgcaggaaaacggaggaggtactacggaatggcagaaaggatatcagaacctgcgtaatgtgaattatttctttgaatactataaagtgccggaaacagaagagacgaaagatgtactttcaatgaaaggtgaggcttattttttccgtgcatactggcatttttatttgctgaccagatttggaagtattcctgtgatggatagattctgggacggcaatgcaactgtcggcggtttgcagattcctccgcgtgaccgttccgcagtggcgcagtttattcttgacgatctgaatacagctaagggattacttcactcgcgtagccagtataaaggtttgagagtgtgtaaggaggccgctattattatggctatgagagtggccctttatgaaggtacctgggagaaatatcacaaaggaacagactttgccgctgctgaagataaatcggcagacttactgggacaggtgctgacactgggcgatgaactgtttggtatgggacttactttgaacacaaaagctaccgataagaatgcagtgaatatagaagatgcttatgcgcatgtattcaactcgaaagacctgtcggatatgacagaggttgtattttggaagaaatattcgatagcagatggtgtgattcataatctgagcagtaatctgggagcgggttatgtagataacagcggaccggcaggtttatctcagtcgttggttgataattacttgaatgctgacggaacacctatcaatcctgctgacggcatttttaaagatttcaatttgacttttaaaggccgtgacggacgtttgctggcgacggttatgcattcaaattgtaagtttaagtcaacctcaccggaatcaaaatcgaaagcgatgctggtagaggaatattcggaagaaaacaaacagatagttcgccccccttatctgactgaaggcggtcctgcgcgtaatgctaccggttatcacatccgtatgagtatcgatactacatatgtaagcggtcagggcgagacgtctcttccggtgatccgttatgcggaagctctgctggcttatgcggaagctgcggaagaattgggaaaatgtacttctgctgttttggaaaaaactttaaaaccattgcgcgagcgcgctggggtgacctatcttgacccgtctgaaatcgatcctaatttcaccgattttggttataccatttctgccaatttgcaggaaatccgtcgggaaagacgtgcagaactggctttgcaaggttttcgtcttgatgatttgatgcgttggagagctcataaactgattcagggaaaacgtggaaccggtgcttattttggtacagacggtgtattgtacaaagcattcgatcctaaaaacgcagcggacttgaaaacgattctgactacagacggctggctcgacccacagaaggaacttcttccgagaggctatcagtttgatgctaaccgcgattacctgttgccggtacctccgagtgagatatcgttgaatcatgagttgaaacagaatccgggctggcaacggaaataggagaatggaacaagattcatttatgataattagatagataaagatatgaagaacatattatataaaatacttccggtatgtttgttgaccatcggtttgacaggatgtgaggatgagaccaagtatcgtcctctgccggaagctgtacctttgacaatgagcatcaatgaaaaggcgtttgtgatgggagaacacttgaaagtagatattaaagtggaaccagatgctgatggtaatgaggtggtagctaacgaagatttcgatatttactttacggcaaaagccggaacggaagatgtagcgaatgtgttcgaaccatttagtagtattgttactttcccgaaaggagagaagcagattcaggtggattttccggttaagacttccggattagttggtactactacgatggagtttgttgctttcgcacgtggttataagatggctaattccagtcagggaatcaaggtatctgattattatcggatatccatgtctctggaaaataatacagaaaatgtggtgacagaaggcggtaagtttgtattggttgccaaagtagacaaaccgagttctgtgccactcgaagtcactattactccgaaggaaggggaagagggcaggtatgacaatctaccttctactttaactattcctgcaggaagaacttcggtcaaaagtgctgctgtgactatcaaacaggactatgaaatgacaggcgacttgcagttggtattgaatctgaaaagtaattcttcttccaatccgatgactgctcctgcattgactattactatgacagacctggaatcgatggctgatcctgatttgtatgatatgactactgtatatgagaatccgaacatcatgtttgtttcttatgatgatgactggtttacgggtaaagaaacagctaagatggacgaaggaacagcacatccgaatgccgaattgggcagtcagtggaagtttgattatgctattgagttccataaaaattcaacatcgggagattatcaaaaattaggtaatgcaacggatgccaatagaggaaatgttttaaagattgattggaccaaatacgcaaaagttactgatgaaggtgaattgaatatttgtgtaggtgtagaaggtactaattatggaacagcaggaatacattgctgtaagtctttagggcagatgtgggcacaaaatgttacacgtatatatccgggtatgcgtattgaaatgaaagttcgtttaggaggtaatagaacaggatttgtaccgatgatagaggtgaagaatccagcaactgctactacatgtaaagaagctaagcaatcaatctgtatacttaagaatgtttccggctctgcaatcacccaatcggtgaggggagaggttgtcagtgatgcgaagagcgtagtatctgctattcctaaagtagaagattataatatttattgggtcgaactagtcgatgaaaatacaataaagttaggtattaatggttctacaaccttggaagtcacaagggatatgttggattcatggccttttaccaaagcttctacgggaacatcagttggagcgaaaggtctttatttagtaatgcgaatggacttgttcggagaaggtaatagtgtttcttctgaacttccggcaggttgggatactgaactgaagtcaattaatcctgcaaattatgcaacagaaggaccaagaatgataatagactggattcgtttctatgtaaatgataactataaacgggaagcgaatgaacttgtgaatagagactataaagtctcaattcctggtaagttctaccagttctattaatctgtcatattgacgaaccgttttcaatagtatgaaataagttcaatgccggaaggccatcgtgcaacagcgatttacttccggcatttactgctaattcgggtggaaatagagaatattgtaaatacattagctatttgtagacatactttttacatatcttccctatctttgccatgtaatctaaataaattaatcattatggaaaacctgcaatcaaacttgttctattctttggcaggagtagccgccgttgcctcccttgcatcttgtacaaacaagcagaaaacgacagaacaaaagccgctgaacatcgtctatattatgacagacgaccatacagcccagatgatgagctgctatgacacccgctacatggaaactccgaatcttgaccgcattgcggcggatggtgtacgttttactcaaagcttcgttgccaattcattaagcggtcccagccgtgcctgtatgattacgggtaagcatagctgtgccaataaattctacgataatacgacttgcgtattcgacagttctcaacagacattcccgaagctgctgcaaaaggtaggttatcagactgcgctggtcggcaaatggcatctggaaagtttgccatccggatttaattactggcagatagtacccggacagggggattactataatcctgcctttattacacaagataatgataccatccagaaacacggatatatcacgaatctgattaccgatgacgctatcgactggatggaaaacaagcgagatccggagaaaccgttctgcctgctgattcatcacaaggcgattcaccgtaactggatggcggatacatgtaaccttgccctctacgaggacaagacattcccgttgccggataatttctttgacgactatgaaggtcgccctgctgcggctgctcaggaaatgagtatcgtgaaggacatggatatgatttacgacctgaagatgcttcgtccgaatgagaaatcacgcctgagatcactttatgaaagattcctcggacgcatggacgaaggacagcgtgccgcatgggacaagttctatgctccgattatcgatgatttctacaaacagaatctgacaggaaaagaactggccaactggaagttccagcgttatatgcgtgactacatgaaaaccgtgaagtctcttgatgataacgtaggacgtgtgctcgactatctgaaggaaaaagggttgctggacaatacactggtagtttatacttccgatcagggtttctacatgggcgaacacggttggttcgacaagcgtttcatgtatgaagaatctatgcgcacaccacttatcatgcgtctgccgaaaggtttcgaccgcaggggagatatcaccgaaatggtacagaacatcgactatgcacctactttccttgaactggcaggagcggaaattcccgcagatatccacggagtatcactgctgcctctgttgaaaggtgagcatccgaaggactggagaaagtctctgtattaccacttctatgaatatcctgccgaacacatggtgaaacgtcactatggcgtacgtacggaacgctataaactgattcatttctataatgatatcaactggtgggaactgtatgatatgcaggcagacccgtcggaaatgcacaacctctacggtgaggctgaatatgaactggtagtgaaggagctgaaagacgaattgctgaaactacaggaacaatataatgatcccgtccgcttttctccggaaagggacaaggaataacccccgaataatacaatgacaagaacgattttaatattactgataggctttctatcttcgatagtagccggatgtagcgatactaacttgacacatgacatacccttggttccacgcccggcgcaaatagtgccgggcagcgggaactaccttttctccggtaaaacggtatttgccgtagagaacgaggagcaggcggaagtggcacgcagctttatagctttgtttacccgtgcggcaggctttactccgaagttgacggtaggcgatgcggaaaagggaaatgttcgtttccagacggatgcaaccttgaaaagtgaggcatatacgctgcaagtgtctccgaaagaaattattatcgaagcatcggatgcaaaaggattcttttatgctttgcagaccattcgccagttgtttccggcatccatcgaaaaagaggaagtgtcggataaaaaagtaaaatggagtattccggcagtgagtattcaggacgaaccgcgttttggttaccgtgcgttattgctggatgcgtcacgcttctttattcccaaagagaatgtattgcgcattatcgattgtatggcaatgctcaaaataaacacgcttcactttcatctgacagatgataacggctggcgtgtggaaatcaagaaatatccccgtttaacggaagtaggtgcatggagagtggatcgtacggacctgccttttcctgcccggcggaatccggaacccggagaacccactccggtaggaggtttctacacacaggaagaaataaaggaaatggtggcttatgcggctgaacgtcagattgaagtggtaccggaaatcgatatgccggcacacagtaattcggcattggcagcttatcctcatttagcttgtccggtagtgaaggaatatatcggagtgctccccggtttgggaggacgaaattccgagatcatctattgtgccggaaatgacagtgtctatgcctttcttcaggatgtgatggatgagattctggaattgttcccttcccgatatatccatatcggtggcgatgaagcccgtaaaacttattgggagaaatgcccgctgtgtcaggcacggatgaaaaaggagaagcttgccaatgaagaggatttgcaaggttatttcatgaatcggatgagcgaatatgtacgtagcaaagggcgcgaggtgataggctgggatgagctgacgaacagtagctttttgccggacgatgccattattctgggttggcagggatacggacaggctgcactgaaggctgccgagaagggacatcgcttcatcatgactcccgcacgcatcatgtacctgattcgttatcaaggaccgcagtggtttgagccgctgacgtatttcggcaataatacgctgaaagatgtgtatgactatgagccggttcagaaagactggaaaccggaatatgcggatttgctgatgggcgtacaggcttgtatgtggacagagttctgtaataagccggaggatgtggattatctggtattcccacgcctggcggcattggcggaagtggcatggacacaaccggaaaagaaagactggacttcgttcctgaaaggaatggattcgtttaatgaacatctctcagccaaagggatagtgtatgcccgttcgatgtacaacatacagcataccgtgagaccggaagacggagcactgaaagtaaaactggaatgtgtccgtccggatgtggaaatccgttatacaatggatggaagcgagccgaccgccgcttcaccgctctatgaacaaccattgttggtaaaagaagctcaaacagtcaatgccgcaacgtttgccgatggacagcagatggggaaaagactgacgcttccggtacactggaacaaggctacggcaaaaccgttgctgggtaataaagtgaatgaagctgtcctgaacaacggagtcagaggaagtctgaagcaaacggactttgaatggtgtagttggggaagtagcgaccgtatttccttcaccgtcgatctgttgcaaaaggagaaaatgaatacgctgacaatcggttgtatcactaactatggaatgggagtgcacaaaccgaaatcaatccgggtagccgtgtcggacgataatgcgacttatcgggatatcaacgaattggaatatactcccgaagagatattccgtgaaggaactttcatcgaagacctgtcgatagatatgagaggaaccgttgcccgttatgtgcgggtgacaacggaaggagcgggagaatgtccggcaaatcatgtacgtcccggacaagaatcaagagtatgtttcgatgaactgatcattgaataaccagtcaccaaaaaacaatataataatgatgaaattaaagaaacgaacgtttttaatcttgatggcagcactgactgctaccttcgcttcggctcagaaacagcctttgccggagtggcagagccagtatgcggtaggactgaataaactcgctcctcatacctatgtatggccttacgccgacgcttccgatattgaaaagccgggaggatatgaacagtctccttattatatgagtctgaacgggaagtggaaatttaactgggtgaagaacccggacaaccgtccgaaggacttttaccagccctcttattataccggagggtgggcggatattaatgttcccggcaactgggaacggcaaggctacggaacagctatctatgtcaacgaaacttatgagtttgacgacaagatgttcaagttcaagaagaatccgccattggttccatctgctgagaatgaagtaggttcctatcgtcgcacgtttaaggtgcctgccgactggaaaggacgtcgggtagtgctttgctgcgaaggagtgatctctttctattatgtatgggtgaacggaaagttgcttggctataatcagggatcgaagacggctgccgaatgggacattaccgatgtactgagtgaaggagagaatgtggtagctctggaagtatatcgctggagttcgggtgcttatctggaatgtcaggatatgtggcgtctgagtggcatcgaacgggatgtttatctgtatagcactcccaaacagtatattgctgactataaagtaagtgcttcccttgataaagagaaatacaaagaaggtatcttcaatctggaagtgacggtggaaggtccttctgctactgccagctccatcgcttatacactgaaggatgcttccggaaaggcagtattgcaggatgccattaacatcaagtcccgtggactgagtaactttatcgctttcgatgagaagaagattgcagaagtaaaagcatggaatgcggagcatcctaacctttataccttggtactcgaattaaaagatgcgcaaggaaaagtaaccgaactgaccggttgtgaagtcggtttccgtacttcggaaatcaaggacggacgtttctgtattaacggtgttccggtgctggtgaaagggacgaaccgtcacgaacattcgcaactgggacgtaccgtaagcaaagaactgatggaacaggatatccgcctgatgaaacagcataatatcaacatggtgcgtaactcacattatccgactcatccgtattggtatcagctttgcgaccgctacgggctgtatatgattgatgaggcgaatatcgaatcgcatggcatgggatacgggcctgcctcccttgccaaagacagtacttggctgaccgctcacatggaccgtacacaccgtatgtacgaacgttccaagaatcatccggctatcgtgatctggtcactgggcaatgaagccggcaacggtatcaacttcgagcgtacttacgactggctgaaatcggtagagaaaggccgtcccgtgcaatatgaacgtgccgaactgaattacaacacggacatctactgccgtatgtaccgcagtgtggacgaaattaaggcatacgtgggtaagaaggatatttatcgtcctttcatactctgcgaatatctgcacgcaatgggcaatagttgcggtggaatgaaagaatactgggatgtctttgaaaatgaaccgatggcacaaggtggctgcatttgggactgggtggatcagaacttccgtgaaatagacaaagacggaaaatggtactggacttatggaggcgattacggaccggaaggaatccccagcttcggtaatttctgtggcaacggtctggtgaatgctgttcgtgaaccgcatccgcatctactcgaagtgaagaaaatatatcagaacatcaaagcgactttgtcagaccagaagaatctgaaagtctgcataaagaactggtatgacttttctaatctgaatgaatatatcttgcgttggaatgtgaaaggggaggatggaaccgtacttgccgaaggcacgaaggaagtagactgcgagccgcacgctacggtagatgtcactttgggtgccgtcaaacttccgaataccgttcgggaagcctatctgaatctaagctggagccgcaaagaggccgctccgctagtggataccgactgggaagtggcatacgaccagtttgtacttgccggtaataagaatacgacggcttatcgtccgcagaaggcgggagaaacagcttttgttgtggacaagaataccggggcactttcttccctgactttggatggaaaggaattgctggctgcaccaatcactttgagcctgttccgtccggctacggataatgataaccgggataggaacggagcccgtctgtggcgcaaggcaggtttgaacaatctgacacagaaagtggtgtcactgaaagaagaaaagacatcggcaacggtccgtgctgagattcttaatgggaaaggacagaaagtaggaatgacggattttgtttatgcactcgacaagaacggggcattgaaggttcgcaccaccttccagccggatacggcgattgtgaagtcgatggctcgtctggggctgaccttccgcatggcagatgcttataatcaagtatcttatctgggacgtggcgatcatgaaacgtatatcgatcgcaaccagtccggtaggataggactgtatgatacgacggtagaacggatgttccactattacgctaccccacaatctacagctaaccggacagatgtacgctgggcgaaactgacggatcaggcaggcgaaggtgtctttatggaatcgaatcgtcctttccagtttagtatcattcctttctcggatgtattattagagaaggcgcaccacattaatgaactggagcgtgacggaatgataaccatacatctggatgccgaacaggcaggagtaggtacggctacctgcggaccgggtgtattgccgcaatatctggtaccggtgaaaaagcagagttttgaatttacgctttatccggtaaaatagcctgaaactgattgcatttggatagaaatattgcattgagatagaatataggggagcgaatggcatggatttagcgaagtttaatgaaaagcgcttcgggaaagccatgaaatttgctcctttatatttatctttgtctcattagcattaaatcaatatttattatgatgaacaaactacttacttctctctttttatcttctgtgataacgttgggcggatgtggactgacgaaagaaaactactatgtgaagcatgttgaatttccacaggatgcaaccctcgaacaaaaaatcgatatggcagcaaggctggttcctaccccccagcaggctgcgtggcaacaaatggagctaactgcttttctgcatttcggtatcaacacattcaccggacgcgaatggggcgatggtcaggaagaccctgctatctttaaccctacagagctggatgcagaacaatgggtgcgcaccttaaaagacgccggattcaagatggtacttctcacggcaaagcatcatgacggtttttgtctgtggcctacagctaccacgaaacattcggtagcctcttccccttggaaaaacggtcagggcgacgtagtgaaagaactgcgtaacgcttgcgataaatatgatatgaaattcggagtctacctctctccgtgggaccggaatgcggaatgctacggagattctcctaaatacaacgaattctttattcggcaattaacggaattacttactaattacggcgaagtgcacgaagtgtggttcgacggcgcaaacggagaaggaccgaacggaaagaaacaaatctatgactgggatgcgttctacaagactatccaacagttgcagccgaaagcggtgatggcaattatgggcgatgatgtccgttgggtaggtaatgaaaaaggattgggacgcgaaacggaatggagtgcaacggtgctgactccgggcatttatgctcgttccgaagaaaacaacaaacgactgggcgtctttagcaaagccgaagatttaggaagccgtgcgatgctggaaaaggcaacggagttattctggtatccttcggaagtagacgtgtctatccgtccgggatggttttatcatgcggaagaagacagcaaagtgaaatccttaaaacatctggctgatatctatttccaatcggtaggctataactcggtgctcttgctgaatattcctcccgaccgcagaggattgattaatgaagcggatgtgcagcggttgaacgaatttgctgcttatcgggagaagatatttacgaacaaccgggtagagaaaggaagaaaagactgggaggctgtttccggcagtgaaactgtttattccttgaaaccggagtcggaaatcaacgttgtgatgttgcaggaagatatcacgaaagggcaacgggtggagtcttttaccgtagaggcattgacggaacaaggctggcaggaagtggcgaaaggaacgactgtaggctataagcgtatggttcgttttccggcagtaaaggctacccagcttcgggtgaagatcaacgaatgtcgtctgacggctcacatcagtcaggtggcagcctactatgcagatcctttggaagaagagaaccggacggaaaactggaacaatctgcctcgtgcttcatggaaacaggtggctgcttctccgttgaccattgatttgggcaaagaagtcgaactctccgcatttacttatgcacctctgaaagcggaagcgaaaccgacgatggctttccgttacaaattctacgtgagcgcagatggcaagaactggaaggaagtgcctgccaacggtgagttcagcaatatcatgcataatccgttgccgcagactgtcactttcgatcagaaggaaaaggcacgctttatcaagctggaagctaccacccctacggctacaacggcgcaagtagaaatgaatgaaatcggagtgaccgttgctccttgaagaaacattgaattttaacttaataagtacatcactttgagaatagatacttattcattctaacctaataattatcaaaagacaaaatgagaaaagaattttatggtatattacctttagcgttaacttcctgtctggcttctcaggccactgctcaggagaaacaaacccagcgtccgaatgttgtttttatctatgcggatgatatcggttacggcgatttgagttgtaacggagccaagactatccatactcctaatgtggaacgtcttgccaaaatgggagtacgttttaccaatgcgcacagtgcagctgctaccagtacgccttcccgctatgcgatgctgaccggcgaatatgcatggcgcaaagccggaacaggtattgctgccggagacgctgcggctattatccgtccggaacgctatacgatggcgaacctgttcaaggatgccggatacaacaccggagtcgtaggcaaatggcatctgggactgggcgacaagggcggagaacaagactggaacaagcctttgcagccgggaacgaatgatatcggcttcgaatattcctttatcatggcagctacgggcgaccgcgtgccttgtgtatttgtagagaatgatcaggtgatcaaccttgatccgaatgatccgattcaggtaagttacaaagcgaacttcccgggagaacccaccggaaaggataatccggagttgctgaagatgcatccttctcacggacatgatcagagtatcgtgaacggtatttcccgtatcggatatatgaagggcggaaagtcggctctctggcaggatgagaagattgcggagacgctgacaggaaaagctgtttcctttattgaaggacacaagtctgctcctttcttcctgtattttgccacgcaggatgcgcacgttccccgtgttccgtctccacagttcgcaggaaagagcggcatgggacctcgcggcgattgtctgctcgaatttgactggtcggtaggcgagattctgaatgcactcgaacgactgggattggacaagaatacactggtgattctttccagtgataacggtccggtagtggacgacggatataaggatcaggcagtggaattgctgggcgatcatactccgggcggcatttatcgcggaggaaagtacagttcgttcgaagcgggtacacgtattccttgtatctggagctggcagggtgtgatccgtccgggaacagtttcggatgcattgctctgtcagatagactggtttgctacttttgccgaaatgctgaatgtccgcttgccggaaggtgcggcaccggatagtgaaccgatgctgaaagcgtggacaggcaagcaaaagaagggacgcgaatggctggtacttcagaatgcacagaataacctgtcggtgacagacggaagatggaaatatctccgtccgggaaatggaccggcatatctgaaagcagtgaatatcgagttgggaaacagtaaggaaccgcagctttacgatctgaagaaagatccgaaagaaaagaataatgtggcgggtcagaatccggaactggtaaagaagatggcagcacagttggagaaaattgtagatggacgctacggtctgccactataaaagaaatgcttagagagtagcagtgggactggcggtcttgatttctagtaaatcggacgccagtcttttttttaaaccaaacgtaggttttcactgttatcattctatataaatgatatataaagaaagaacttatgttagtagtcgatttaggaaaatggatgaacaaaatcctgatagattgggggatagatgcgaaggttgccgatcgttttgatgaaacaattattgctatactgatgatagccattgctgtaggggtggactatctttgtcaggcaattctagtgggaggaatgaggcagtatacccgcaggaaaccgcatctttggaatacattgctgatgaaacgtaaagtgtttcataatctgattcatacgattcccgccatccttgtctatgccctgttgccgatggctttcatgcgtggcaaggaactgctggttatttcgcagaaggcttgtgccatttatatcatcttttctttgctgctggctatcaatgggattctgctgatgatcatggatatttacgatggaaaggagacaatgaagaaccgaccgatgaaaggattcattcaagtacttcaggtacttttgttttttatcggggggattgtgattatctctatccttgtaaataaatcgcctgctagtctgtttgcgggactgggtgcttcggcagccatcctgatgctggtattcaaggattccattttgggatttgtggcaggtattcagctttctgccaatgatatggtgcgtccgggagactggatcacgcttccttccggtgccgcgaatggtacggtgcaggagattacgcttaacacggtcaagattcagaactttgataatacgatttctacggttccgccttatacgctggtcagcagtccttttcagaactggcgtggcatgaaggattccggtgggcggcgggtgatgaagaatattacactggacctgacgacactccagttttgtacgccggagatgctcgaccgttatcggaaagagattccactcatggcggattatcagccggaggaaggagtggtgcccaccaattcacaggtttaccgggtgtatatcgagcggtatctttgcagtctgccggtggtgaatcaggatttggatttgattatcagtcagaaagaggctaccatgtacggagtacctattcaggtttatttcttttcccgcaataaggtgtggaaagagtacgagcggattcagtcggatatcttcgaccatttgctggcgatggtgccgaagttcgacttgaaggtatatcagtattctgactaactccctaggggacatctttgccaacggcttggcacaactgtgccacgcctgtggcacggccgtgccaagctgttggcatagttgtgccaaagcgttggcacaagtctttcgcagggatgttacggatgatgctccggtatgtcccgtcagttagcaaggaaggtcgttaaaagtccggaccgtttctagcttctttcatcagtcgttcgaagcgttttacgatatcgggatgttgcgcagccacatcgtgttcttctctgatgtccgtttccagattataaagctgcatttgcgtattgcctttccggatgtccgtgatgattcctttccattttcccatgcggattgctttgttgccaatccttgggtcaggatattcccaatataaataagtatgttctttttgtttcccttttttgccgagcaatgtgggcagaaagctgattccgtccgttggcggacaagtgatgcctgccagttctgccagcgtaggcataacgtcctgaaaagcgcagatgtggtcactttgcgtaccgggttttattttgccgggccatgtgataatggcggggacacggatacctccttcatgcaagaaacatttgccccatccgtatgctgaattgaaaggtcccccgctgttgaaccagggagaatcgctgcctccgttgaacgtaggaccattatctgaagtaaacacaatcaaggtattttcgtacagatgttccgctttcagtttttcgatcagttggccgatctgctcgtcgaaataactgatcatagccgcataggtagcatgcggataccggcagggcagatatcccgcttgtccggtgtaaggcttttcgtccccgaatttctctacataatgctgtacccagcgttcgggtgcctgaagcgagacgtgcggcaggggagtggtccacatcaggaaaaacggtttgcgtttattggcatcgacaaatcccatcagttcatcaaagatcagatcgttggcatattccttttgcgtatatttagcgtagctggcgggatcgttcggatcggcacctttatccagagggcttcggtgagggtctgtcactttgttggacaggtagacacgttcttcgtcattatacagaaaaggaggatagtatgtgtgcgactggcgctggcaattgtatccgtagaatcggtcgaatccctgtttgttgggagttccttcggaacccggatatcccagtccccacttgccgaaacatccggtggtatatcccgcttgttgcatcattcgcccgatagtcatcgtgttcgcctgtagggggaattgcccttccagctctttatgaacgtacaccgagtcgtagttgtttactgctccgcgttcggctaactcattgttgaagcggatttgcgcatgaccggagtgcatacctgtcatcagtacgcagcgtgccggagctgatacgggggaaccggaataatgttgtgtcagtttgatgccttcgctgcataaacggtcgatatggggtgtttctattttgtcttgtccgaagcaaccgatatctccatatcccagatcgtccattaaaatatagataacgttgggagatgcgggttgggtttgtccgtgcaggtaaccgctgcacagggcgggtattgcgatcaataaatttcttttgttcatgatgttcttttttttaatcccatttataatctttcgttacttcttctttcagagccggtccgaattcgaatccagcttcttcgaaccatgctttgcggtgaaggatgttccggtagaaccggtcgaagtcaagcgcttccccctcgtgccacatctgttcggacagagcgaggatgcgtgggaaaaggcgtcggtctatcattcgttccgtgactccgtcgtcggtccataatgcgcagctcataccaagtatcagaggatttttctcgctgatggctttgtcggaagggttgttcagatagatatctttcaagtcgaacgtacgtgcttccgtatatcctttccacggggtgacggggaagttcagatacgtatagtagttggaactgcaaatgaccggataatggtgtttgacggcgtttctgagtgcgaggtctttgtgtccccgatagttccaccactggataacggtattgtccggcaacgggtagccgtcatgatagactacgtcgccccagaagatggctttccgtcctttcgacttcagatagtttgccatttgcgcagagaaccatagctggaggtcgtgactgtctttgagtccttctgtggtaatccttttccggcaatccgggcattgatcccagttgcctttcggggcttcgtctccgcccagatgtatgtagggagaaggaaagagggcacatacttcatccagtacgtttttcaggaaacggagagttccgtcttttcctgcacaaaatatgttctgggtaaatccgctttgcggtatctctaccggcaatccgaaacaaccgagctccggataggcagagagagcagcttcggcatggcccggcatatctatttcggggacgatggtgatattccgttgacgggcatattcgatgatgtcccgtatttcttcctgtgtatagaatccctgctgttcttctcctttgcctaccgaaccgccagtccgggtgaggtgcggatattgcttgatttcgatgcgccatcccagtccttctgtcagatgccagtggaagtagttcattttgagcagtgaagccatgtcgatatactttctgatggtggcaatcttctggaactgacgtccggagtccagtaagaagcagcgccactgtgtgcggggatagtccgtcacgcttgcgcaggcaaaggtgatagatcctgctgaaccggctacccattggcgtagcgtttgtacggcataggtgaatcctcctttgtcggaggcgctgattaccatctgttgcggatgaatcctgatccggtaaccttcggggggcagggatgagtcggttatccagcagatatcggctttggattcttttttttgccatttgatgggagtgcgggagagtacttcttctcgaaaaaggtttagataaaaagcggtagtgtcttcggcgtacatagaaacctttttccctaaaatcaggttgcctgtctgcatttctacttgattgggggtaggaaatacgatttgggcgcggacggcgactgtgtacgatagaagaaagagagctgtaaaaattaggtgcttcatggggtacagtgtgtttatttagattttgtaagagtcggcaaaaggattacccgtattagtctgatgtctcaaaaatacgaataaatttcaagtactcaattattcttttgagtaaacttacgaaatcaatacagttaaaaagggaagaggcagtgtcaaatatcaaggtctttcagccacgctaatgacgaaatgcttgtcctgtcattgggatgactgtcaagaagagccaatatttgccacagcctcttccggttagttccggattatccggttggtgatggattaccggttaatttccttcctcccatcccggattctgttcgagttggggattcagtacccgttcgttgcgtggaataggattgaggtaatagtaatccggccatagatgattctgtttcggatggaattcgagatatccttcggagccgccaccgtcgatagtcacattggttcctgccgtgaagtcggatgcacgtacgtattgtccgagtttcttcttcagtgcataatggcatttcttccatcttctcaggtcgtcgaaacggaatccttcggagaacagttcgatgcgtcgttcccgtcgtatttcccataatagcggactcacttcgtagtcgttgggataatccggatttccgagatcacgtttcgggtcgaaggctgagtttatttccgagactttcatgagttttacattggcacgcgggcgcagtttgttgattgtggcgtcggcaactgtctggtcgaactcgccgagttcgcacatggcttccgcgtagttcagcatgacttcttcgatgcggaaaataggcatatccgtctcttcatttcgttggctgcccatgctcaggtagcagcaatagtatttccagttgttatatccgaaggcagacttgtaccacggctggttctccagatagaagtcaaagtgaggcgatgcacccagaataccaccgtcatatccttgacggaatggcaataacttctgtcgttccttgctggtgccgtacccgattcccatgcggacggtgaggctgtcgataaaactgcggtctttggagttatccgtaaatttccatttattgtcccaggctgtgctggaagccgaacggtctacccggtaaggaggagtgacgtgcagccacaaacgatggtcacggttgctgaactcgtcgtatatatccttgtcacccagataggcgtcactcgtccagcgtggctttccgtccgtgcacaggtaactgtccactaagtcgcgggtcggattgtaaaaggaggtagcggtcgttcccccgatgctgacagcgtgcactacaccgacagcatccgaatattctctgtacagaatgacgccggtaacatctttcagttccagtgaacagaacagatcgtcgtagcagtccgccacgttcggataagtctgcatcagttcggcggatacccgtttgcattcccgcagataagtttcggcgttgttgagtccgtgatatttacgccaggtaccttcgaaaaggcagaaacgggagagtaaagcctgtacacaagccttgttgatggtgtttctgccttctccgttcacgttgatattcttttcggcaaattgcaggtcttccagaatgtgaccggctatttcatctctggaggcacgagggcctttgatcagttctgtttcgtcgtcgctcagcacatgatcaatccagggtacgccaccgtaagccgacaggagagacaggtagcggtaactacggaaaaagtaaccgacggaacgccagttcgccttttctacatccgtcattttcgaaccgtcaatgcggtcgagcatcaggttgaccctccggatatagctgtaatagttccaggaagtattgtctttcttgtcggggatggtcaccagttttctgatccagttgctttcgctggttcctcttgtctggttgtacgagatgtcgtccgtagaattttccgagccatagcccaatgaaggcagggtttcatacaatccccaggcgtatgccttgaaattgtcgtatgtttcaaaagccgtttcggcagtcgggtctcccaaaggatacctttccaggaaatcgttattgagacagcttgctaacaaaactgtacatataaagattaaatattttctcataatacattggttattagaatgtaacattgataccgaaagagaattttctcatgaacggatattcccaggcaccttttgacagcatatcggtttccagtccttccggcaggtgatcccacgtgtagaggttctctccgctgaagaatactttcacatcgtcgaagtagagacgctgggaccatactttgggcaaggtataggaaagcgtgatgttttgcagtttcaggtaagaggcgttggcgagatacttcgactgtttccagtggttgtagcttgtgtttaccccgtcgttggaatacacacgcggataataggcattggtgttagtcggagtccagaagttgagagtttctttgaacaggcttccccagcctccggtaggccatgcgatctggtcggtgcgccaataatcccgtttgcctacgcctcggaggaagatagagaggtcgagtcctttccagctgattcctgcggtgatgccgtagtggaaacgcggagtcgagttaccgatgatacgctggtcgccgggattgtcggcggttccttcgccgctccagatggtttcggtatcgtcatcgaagttcttatacagcacgtctcccggaaaaacttttcctgctcctttcggaatggggattcccggttttagtgtaccgtctgcgttgaagtcgtcttccgtgtagaagcggtcggtgacatatccccagatttctcccattttcatgcctttgcggtaaatcttgtcgcctagcaggttggtctcattattgtatttcgtgatttcactttgtgagtcgtacaggttgaatccgatccggtagctccagtccttgttgatgcggtctctccagttcagttccagttcccagccgtacgtcttcaggtcagcggcgttctgtttggcggcggtggctcccactacccacggtaggtccataccgggtgccagcatccctttggtgtcgcggcgataccagtcgaaagtaccgttaaagcggttgtcgaagaatccgaaatcgactccgaagtccagtgtatataccttttcccacgagaaactgctgctgaccattgccggtgcattcagtgtagtcgtcttttgtccgtccaccagccattccgtcaggtaaggtgacatagaagggatgtagggatagttttccggagtgttgtccggcttcagtatgatctggttgccgatagagccccatgaggcacgtagtttcaagtttgacaggaagcttttggtattcttcatgaatgcttcttccgaaatgcgccatccggcggagaaagaagggaagaaaccgaaacggctgtctttcgggaaacgggatgtaccgtcgtagcgtccgttggcttcgaacatgtatttaccgtcgtaagtgtaattgacacggtagaacaaacctctgatagcatattcatcgaaactgtcggtgacggatgccgttccggtagaaccggagagcgacggcagattttccagtaatacgtccgtgcgctgcgaccattgcgattccttatgactctcttcctgattgtaaccacccataatagagatatcatgtttacctattgaaaagtcgtaattggcgaatgcgttaatagcgttgtaattggtgaaaccttgcgtcagggcataacgtgagttctctacattgttcagcagccctgtaaagttgaatcctatatacttgtatttgttgacgtacatccggttgtactcggtgatccggttgtaggtatattcacctgttattttcagtcctttcagcggagagatgatgacacgtcccaaagtacgcaggttggtcttcttgatcaccctcggttctccgtagcgtacgaaagtagcggacgtttcggcaggatattcgatgccgtcttgttcgtatggcaggatgttgtggtaggacggcaagtacatggcacttccccagacaccgtttcgtccgccttgctccactttgttctgggtggagttcgcgtatctgatatccagttgggtggtcagccacttgtttacgtcgacactcaggaagctggacatattgatacggtcaaatttgtctttgtccgttaccagaatgccgtcctcaccggtatatcccaggcttagtcggtagctggtacgctggctgcctcccgatacggagaagctgtggttctgcatgaatccgaagttatccatcatatcggcaaacatatcattctcccgcatcaggaacaggttgccctgatcgtcgaaaatatatccgttcggataattggaaggattcgcctgatagtctcgtatgtagccttcccattgggtgatgttttttccgtctacataggtatcgtttgcccatcccatttccttgtacgccagtaccgattccagcggacttgctttctgcggaagctccgatgctttcgagaaagagaagttgttgttgtaattgaatctgggagccatgtcctttttaccttgcttcgttgtaatcagaatcacaccaaaagctgcgcgggcaccatatatagctgcggaagcggcatctttcaaaatagatacggattcaatatcctgcgggtcaatcatgttgatatccatcggtacgttgtttaccaatacgagaggctcaccaccgttgatggaggttgttccacggatattgtacgtcatgtcgtctcccggagttcccgttgtcgattcaatttttagtcccggcacgactccttgcagggcagccgaaacgttggtaatcgggcggtcgcccaacgactctttgatatttacagaggctacagcgccggtcatattcacttttttttgtgttccgaatccgatgactaccacttcatccatagtctgggtatcttcctgtagctgtatgttgaaaagtgtcttgtttttgactgttacttcttgtgtgacgtaaccgatataagtaacccgtaacttactgttggcaggtacttccagtgagaattccccattcatgtcggtaatggtcgcttgtttgctgccgtcaaccagaacatttgctccaatcagaggttcgccctgcgcatctgttacggttccccgtatttttatggactgctgggtagaagtagtgttgttgggggctgcttctgcctttgccgggacaggaatgataataatatgcttaccttcctgtctgtaagtgaatcctgttcctttgagtacggagttcagaacagaagagactgcttctctgacaaaattggcgctgaccttttgtttcacgtccagtttcgtctgattataagcgatactaaaatcggtctgatcttcaatgatttcgaatacttttaatagaggttggtttttcatagataccgttattggctgattttgcccataggctatgttataaaaacataaagcgaataacaatatataaaatttatgaatttttacgggataacctatgcccgacaatttataaaatttcatacttttgtgagttaatcattaatactaatttaagtgtacacaactaatttaaatgaagtaattttgatttgggggagttggtatccgcgaaatatcgactcccttttttctgtctatcggcctcctttcttatttaggggtgaataaattaagagaatgttctcgtcttcgactttatagtctatgtttcctatggttttggtcacgatattcatgatctccttgataggagctttttgtttgaacttgatggtatatacatcggtggtagccagatgcggagggacgatgatgtgtatgtcgtatattctctctatcgtaatgaaaatatcactgagagtcattgccgcaaagttcagctcgcctctggtccagccggagtagacagaggcgtcgataatctttttattaaattctccggacgggttgtcatattccagttgctcgttcggtgtaagggtgatgatatcctcattgtttgctttctgaacgactacggaacccgattccaaagtagtggttgtcttctcgtcttctgcataagcgtgtacgttgaatttagttcccaatacttttactttcagatggttggtcttgacgataaatggatgttgcttgtctttctttacgtcaaaattggcttctcctatcagatataccgaacggatatccccggtgaacttttgcggatataccagtaaagttcctgagttgaggtatgctgtggtgccatcgggcaaggtaacctgtttttgttcgcctctgggcacatagtactcgacaagttctgtatgctcttcattcgattgtatatataggtaggatgccaccatagagagcaggggaaccagtaatacagccgccacctgcagccatttgcgcaaggtataccttgcagttgccttccgctgtcggggggccattttcctgcggaagttctgataggaacgttcggtacctgcatcggccttgaaattctgggcttcccataattccatcaatgcttcatctttttctgcctgttcagtggagtcgacaagccatttccataacttctctttaagttccggactgaacttatcggaagtaaagtttttaattattttatgagcgttcgacatattagcgcattttaggtgtggttacatatgtaagatacgtaactgattaataacgcacagcctctatgctacttttttttagaaaaataaaataaaggttatgaataatgcttttcggatgtcggtaagtgcttgtgaaaggtggttctctactgttcgtttgttgatgcttagttcgcgggctatttcttcgttgttaattcctgattcccggctcatcttatatattttctgtcgttgtggaggcattttttctacaaccattgtcaccaatagttcgagttctttgagatggatggtgtcatcggtttcgttgctttcctgtggcgggctatgcttttcagtttctttctgctgatagtttctgaacagtagtgtgcgttcgatgtgccggtataccgcatttttggaaatgcggaaaagataaggtttaaggttattgatggtatggagagatgagcggttgttccataacgtaagaaagatgtcctgcgataaatcttcggcctcttcctgcgattgcagtagtccgttgataaaccctttgatgcggggatagtagtataggaagaaagttttaaaggctttctcatctccttcgctaatagccttcagaagttgtttttcgtcaaaggtttccattgggggtatttttttgtaaatgctgtaaaccctgcaaaaataagtaaattttgtatcgaaccccgtttattaacataaaaaactctttcggctagtataaaattagttcaaaatctgcgtaaataggaagatgatcactgattcctccctgatatttcattcctttataggtacggaaaggttcgtcgtcaccgtatttcttgtcttcagttaatagaaaggggaggcgggcaacagttgccttgtcttcaccggtgaagaatttagaggaagcatcgagtaagttgccggatacaatcaaatggtcgagtaatccccattctccgtgatatttataagagccaaaatggcgggatgttgcttttcgggcaagcagatggtagagctttcggggatttgggaaggtgactgactgttggggatcagtagcttctaagatctccttgatggatttattggttgggtagtcattgaaatctcccatgataatcagttgcggatgaaggcggatgttcagcagactgtcggcttctgtgcgtagtattcgggcggcgtgtagccggtaaggttctgattccttggctccaccggacctggaaggcagatggcagacgattacatcaagtgtatctccggttaataatagtccgctgacgtgcagtaaatctcttgtggggcgatgatgtttgaatgagggaatggggatagaccggaaagataataatttgaataggtcacgttgatataataaagcgacatcaattcctctcagatcgggagaacttgtcataacataccgataccccagttcctttaaaggagaacgtcgtgtgaggtcacgtagtacgctgtcgttttctacttcacaaagacctacaagggcgggtggattccattcaccgacggcagtgatgacacgggccatatcggccagtttcttcttgtacttggtgtagttccagtgacggatggcgtcggggagaaattcgttatcgttctttagtgtgtcgtggtgagtatcaaagaggttttcaacattccagctcatgacacgaaaggggattcgttcttcagcggaagacttcttttgggaaacagattgtttattgctgaacgattctttttcgataagggaagtttgccttgtaaaggatgtttgccctatgatataagagggtacaaaaaagagcattataaaaaagatgacggtcataacaaatatttttctgctatcaccatcatcttttctatgatgtcttacctgactgttatttcttggcaggaacatgtgccagaatatccaacaggtgcttccagaacttctcaacggaagggatgtgcatccgttcgtctggagagtgtactccggtgagggtaggtccgaaagaaatcatgtctaatgtcggatacttgtcgaggaacagaccgcattccagtcctgcgtgaattgctttcactttcgcctctacaccgaaaagtcgtttgtaagattctgctgccacttcgaggatagccgaatgaggattcggcttccatcccggataaccttcaccgaaggtcacatcggcgcctgccagctggaagacggcacgaaccgtattcgccatgtcattgcgtgcagataagatagagctgcgttggctggtttcgatgcggataatatggttcggtttcattttgacagaagcaaggttggttgaagtctctaccagtccggggatatcctgactcatggcatatacaccgtgaggagcagcatacaatgctttcagcaagcgggtagtagtatcctgatcgatagccatcttacggggagtttccgattcaagaaccagtttcaggtccggttcggtaacggccagttcgttttctacttcactggtgaagatattcagttccgtgcggacgtcatgtttggcatcttcgggaactgcacagatagcgtatgcttcgcgggggatggcattgcgcaggttacctccgtttatttcgcagagatacagatcctgacggttagccattcgggacaggaatcggttcagtatcttgtttgcattgccccgtcccaagtgaatatcaccaccggagtgtccgcctttcagtccttttacttctactttgaagaagaaatatcctgcggggacttctacttctttataactaaactctgcaacggagtcgatacctccggcgcatccgataaagatttctccttcatcttcggagtcgaggttcagcagaatatcaccgctcatgaaaccttctttcagctcgaaagctccggtcagaccggtttcttcatctacggtgaacaggcattccagcgggccgtgctcgatgctgtcatccgccaggatagccagttcggtagctacaccgataccgttatcagctccgagggtagttcctttggctttcagccattctccgtctatttctgtttcgatgggatcggtgaggaagtcgtgctgtacatcattgttcttttcacacaccatgtcgatgtgcgattgcaatatgacagtctgaaagttttctttgcccggagtggcaggctttttgatcagtacgtttcctgcttcatctacattggtctccaggttatgttttgctccgaatgcctttaggtaggcaattattttctcttccttcttggaaggacgcggcacttggcagatttcctcaaaatacttgaatacgccagccggcttaaggtcttttttttccatgcttttttcttttataataggaataggaggttcattttgcttcctcttattgctaaatatggttaatttgcttgacttatctgaactcatttctcattaaagcctatctttgcactcacaaaattaatagaaatggttgagactatactgataactttgttaatagttgctatttccctgctattattgggggtgaaagtattctttacgaagggggggaagttccctaatggtcatgtgagcggtaataaagagttgcgtaagaaaggaatcggttgtgcgcagtcgcaggatcgtgaagcacaaaagaaatcacgtttttctattgatgagttggaaaaagccttgaacgatagtatgaactaattaattaaaaacaatattttagagttatgaatagaataaactacctcatgaacggtttagctgcacttgcgtttatcgttttattctcacaatgcgccggcaaagctgataatcaagttgcaactactccggcttcggctaatgcagaattgtctggaatgaaaatagcttatgttgaaatagataccttgttggctaaatacaatttctgtattgacttgaatgaggctatggtaaagaagagcgaaaatgttcgcatgacgctgaaccagaagatgacagctttgaacaaagaaaaacaggaattccaaaagaaatatgaaagcaatgctttcctttcacccgaaagagctcagcaggaatacaatcgtttggctaaaatggaacaggatttgcaggaattgagcaataaacttcaaaatggcctgatggaagacaataatgctaacagtctgcttttccgtgattctatcaacgctttcctgaaagaatataataaaactcgtggatatagcctgatcttcagcaacacaggttttgataatctgctttatgctgatagtgcatataatatcacaaaagaaattgtagatggattgaatgctagatattcatctgctaagaaataaaaatgtttttttaggcccttgggtttcctaagggcattcatgattttaataaattgatgcctgttcaagactgagaagctttgaacaggtttttttatttctcttcttttgcttctttctgtggaatgcggaaagcggtgtaaagttcaagtacggcagcgatagtcaggcaggcaatccattcatttccgcgagtggtaaacatgaaagcccccgtaagtatcagcgcaagtgctccgaatatctgctggatacgcagacgttttaatattttgctttttcctttaaccggtgtgtttacttgtgccagagcaatgaatccggctccgatggtatagatataaggagcatagttccatccggtgatgtatacggcagcccctgtgagagccatgattgcgcctacggcgaaaagtgcgggtactaattgtttcatttattatcttcaaaaacgtaaatatcttcgttgggcttcttcatcagatacttttcacgtgccacctgttcgatagcatccggattgctgttcagctcgttgagacgtttggtattctcttcgtagtccgcccggtatttttctatctcttctttcagctggctgatttcgcgttcgtatcccagacggcggaacaggctgttctcgtccagaaaaccaatgataacagcaaatgcaacgacggtgataagatacttgcgccggcatatgaaactccagatagtgatcagtttatccataatttctcttttttatatccgcaaagataaaactaataacttaaaaacttaccgctttaggttcaaaacttctttctctatcctttattacttatcacttttttgtgtacatttgcactgaaagcgaaaaatcaaaaaaaacagagagaatcccggatatggagaactatattgtatcagctcgtaagtaccgtccgtccacattcgaatcggtggtgggacaacgagcgctgactactacattaaagaatgcaatcgctacccagaaattggctcatgcttatttgttttgcggaccgcgcggggtgggaaagactacttgtgcgcgaatcttcgccaaaaccatcaactgtatgacgcctactaccgatggtgaagcctgcaacgaatgcgaatcgtgtgtggctttcaacgaacagcggtcgtataatatccatgaacttgatgccgcttccaacaattcggtggatgatatccgtcaattggtggaacaggtgcgcatcccgccacagatcggtaaatataaggtatatattatcgatgaggtgcatatgctctcggcttccgctttcaacgcattcctgaaaacattggaggaacctccccgtcacgctatctttattctggctacgacggagaagcataagattcttccgactatcctttcccgttgccagatttatgattttaaccggatcagtgtcgaagatacggtgaatcatttgtcgtacgttgctgcaaaagaaaatattacggcagaacccgaagcgctgaatgtcattgcgatgaaagcggatggaggtatgcgtgacgcgttgtctatcttcgatcaggtagtgagttttacgggagggaatattacttataagagtgttattgagaacttgaacgttcttgattacgaatattatttccgtctgacggattgttttcttgaaaacagggtgagtgatgcgttgttgcttttcaatgatgtactgaataaaggatttgacggtagtcacttcatcaccggattatcttcgcattgccgggatttgctggtcagtaaggatgccgctaccttgcctttactggaagtaggggcgagcatacgtcagcgttatcaggaacaggcgcagaaatgcccgttgcagtttctttaccgtgcgatgaaactttgcaatgattgtgatttgaattaccgtgccagcaagaacaagcgcttactggtggaactgaccttgatacaggttgcccagcttaccaccgagggggatgacgtaagtggtgggcgtggccctaagcagaccataaaacccgtattcacccaacctgccgcagctcagcagccgcaggtcgcttctgcaacgtctgctcaacagactactgttcatactgctccgtctccggctactgctccgtctgccgctaatactgctgtgcgtcaaccgcaggtatctgttgcttcgggggctgctgctccggtaaatactgcttccgctccgtcacagagtgctggaatttcttcgatttccaaagaggaacggaagattcctgtgatgaagatgtctagtctgggggtatctatcaaaaatccgcaacgtgatcaggctgctcagaatacagccaaaaccaatgttgctcaggtgcaaacacagccggaagaagactttatcttcaacgacagagatttgaattattactggcaggaatatgcgggacagttacccaaagaacaggtagctatagcaaagcgtatgcaagtgatacgtccggtattattgaataattcgactacttttgaagtagtggtcgataatgagattgctgctaaagattttacagctttgattccggaattacagacttaccttcgtggaagattgaagaacagcaaagtggcgatgacagtacgggtcagtgaacctacggaaactgttcgggcggttggtcgtgttgagaagttccagatgatggctcagaagaatcaggcgctcatgcaactgaaagatgagttcggacttgaattatattaatgtacggacctctataagatttccatccggatctttaaagtaaatgctccggatggatatgaaagcaatactaatgtaaacgttgattcattctgccactgtatccgtcgctatacctttcttccggcataatgatccatagaataaggtaaataatgattcctgcaaaagcagtgaagatggtagccagcgcatagactattcttactagagtagggtcccatcccaagtattcggctaaacctccgcatactccggctatcattcgttcttttctggaacgagtcagttttttgttgttttccataaagctattgtattaataaaaaataagtcctgtaaatctttcgctttacaggacttgtcttttagtctttcttttgggggtggaagaccggactcgaaccggcgacattcagaaccacaatctgacgctctaaccaactgaactacatccaccatgtctgcgtttctctaacgcggtgcaaagatagatattatctttaaatctccaaaagattctgctacttttttttataaaaaagatattcttttattccccgattatgcttgttgaagagggctcgcgcatcatttgcgaagattctcagagagttacgtgcatttacggaaatggagtcagtagggaaattaatcggtagtaattgatgattcttttttttcgattgaacgggacgggctgtccataccaagctatattcgcaatggttgagtcgggtggtactatcttttactaattccattttgaccatcaagccgccatccgtgcgacgggcggacatattggaaatataatttcccaatgaatatactaccagatgcttctcgtttgtcagactgtcttcgcgaacttcgataggttgcacaacatgcggatgacaaccgattatgtgatttactcctttttgaagcagccaataggtcagaaacttctgttctttgtcggggagtgactggtattcgatcccccaatgcatacaagcaataatcgcatcgggattcagtgttttacttgcttcgatatctttggatataatggtcgtatcaatataattgacgatattgggcggagtgacagggattccgtttgttccgtatgtatagttgagtatggcaatgcggaagccttttttttctaataaaagagggtatttattttcacgctcttcagcgttgaggtacgttccggcgtgtggaatttttaaggagtctattaattgtatggtgcgttccaagccttttctgccacggtcgagactatggttattggcggttatcagtacattgaatccggcattatgaatagcggtcagatattcatcgggagcgctgaaagcgggatagcctttgtacggttttcctccgagagtaacttccagattagctatggcaaagtcagcactttggatttcgtctttgacatattcaaaatagctggaataatcgtagcctcctgtcgcagtacgtgcagcgttaatttgtctttgatgctgcatgaggtcacctgcaaaaagaagcgaaagggtgtctgtttgcaggctgtcagttgtcagtatctgtgtggtagtatcattttcttgcgctttgctgatacaagagaattgtgtaaccagaagaagggatactaatagttctttcatacgttcaagaggattataatgtcttttcgagaatgattgttacttaggcaggaaacggacataataagagagggagagtcgtaattgttttcataactgtcagattaagggaaggaaaaggacagtgaaacacatttcactgtccttcaatattctacttgtaaatagcttttttaccggctaaaagtgtatttttcattaatgatacaatcgtcatcggacccacgccgcccggtacgggagtgatgaatgagcacttaggcgctacctcatcaaacttcacatcgcctgtcagcttgaagccggattttttgctggcgtccggaacacgggtagtacctacgtcgattactactgcaccttcttttaccatttcttctttcacgaagttgggttgtcccaaagcagcgataataatatctgcttcctgacattcttttaccaggtctttgctgcggctatggcatacagtgacggttgcatctcccgggtacgctttctgcatcatcagtgaagccatcggtttgccgacaatattgctgcggccgagtacaacacatttctttcccgacgtctctatctcatagcgtttcagcagttcaagaataccgttcggggtggcggatacatagcagggaagtccgatagacatgcgtcccacgttgatagggtggaatccgtctacatctttacgatagtcgatcgtttcgataactttctgttcggagatatgtttgggtaacgggagctgtacgataaatccatctacgtcgtcgtcattgtttagttcgcgtactttggcgagtagttcttcttcggtcacgtcactttcgtaacggatgagggaggatttgaatccacatacttcgcaggcttttactttggcggctacatacgtttcgctgccaccatcatgtcctacaaggattgctgccagatgcgggcgtttgccgccacgagcaacaatttcggctacttcggctgcaatctcttgtttcacttgttcggaaatggcttttccgtctatcagagtcatattttcagagtatttattggtgatggacaaaagtaaaataaataactgaactctccaaaaggaatggactttttgtggagaggggacagcggaacatattggaatgcgagtaggaaagaaggtaaaaagtacaagggaaagctctgattttcaggcaagaaaaacagagcctctgtttaggtgaaacggaggctctgtttacatcaatcagaggctctgttcgggtgaaatggagcctctgtttggtcttgtcagatcatgttcttatttgtcagcaatttgcctttatactctccggtcaatgtacggaggaaggcgacaatcttatctacttccggttgtggcaggtcgatgcctaactgatatttggccatggcgcgaaccgcatcatccatagtagccatgctgccgtcgtggaaataaggagcggtcagttcaatatttctcaatcccggcactttgaagcggtgacggtcacgctctgcttttgtctgcttgaatcgtccgttgtcttcttcagtcatttctgcctgacggtctgcgaaataatcatgctgtacaccgatcagttcataagattgtcctccgaggatttctcccacatgacaagtcgcacagtcatatttcttgaaaaggtcgtatccggcgatttcatctgcggtgatggcatctttctgtcctttcagataacggtcgaaacgtgaattaggagtcagcaatgtcttttcgaactcctgaatagcatttgtgatattcttttcgttcaatccgtcgggatatacttcgttgaatgccactacgaaattcttgtcttctgccagtttgctgatgatctgatcgaatgactcgcaagccatttctaccggattcaatggagggccggcagcttgttctgccagagttccggcacgtccgtcccagaattgaacaaagttataggcagcattgtatacggtcggggcattgacgccgcccaactgaccgcctactccttcagaatactgcttgttgtcaacgccaccggtatctagaccatgacagctggcacatgaaacggtgttgtctgccgataagcgggtgtcgtgatacaacagatttcctaagaccactttgcgtacatcgactgagatcgagtcggcaataggacgaatcggttcgttaatgaaatcaggtgctactgccacatcggtatacagtcccatgcggtgatgttttacccagctcagtgctacctctttctttgcatcattgaaagaagctccccaatgtacaaggtaatactttgcctgcggcatctttccgtcgaggattactttttctactttagccagatcaaccggattgagagggcgtccttccttcatgtctttctccatctgagtcatgtcgaaagcgcgataggctttgctcacgtcttccattacaatttttccggctacaggcatatttgcatagaacggtagttccggcgtcgaggtatggcatctcaggcatcctgcatccgtaataatctgttgcatctgcacgtttgcttccaaatcggcagaaggcacccgatgcatcagtcggtaaatgactaccaatgccgccacgactaccaataatgctacgattagttttgtacttctcttcatttcacatttgttttttgaggttagttattacgattatataaatgtacgctttgttgggccgccggcaggtaattgactccataccagcacatttgtaaagcaaggaaggagactatgagcagggcatagagtgttttccgtccggttcttctgaacaggcggaggtggatgtagagcaaatatcccatccaggtgatggctgcccaagtttctttggggtcccagctccagtagtttccccaagcctcctttgcccagagagaacctagcagcataccgatggaaagaaaagcgacgcctgcgtagaccagattgtctgctgtatgcaggtattcttctttatgacggaacagtccggtcagggcgatgatgaaagcacatcccagaacggaataagagaacatatatacggttacatgcgggatgaaccatacactttgcagcgccggcatcaatgactgatcgtgtatctcgggcttcatcaaattaatgatcacaaaaactgtagaaagtaacgtcgagaaagagagaatccagcgatacttccatctgatataggttagcaatcctgctattcccataaagaatgaataccacaatcgggtttctcccatagtgcgtaatggagggcgctggaggaatatccataatccggcaataaatattcccaatataataatgccgccggaagtaaaaacgattgccaccttactcttcgatgatgaacgaagggcaaatacagctcctgccaaccataagcagatggatactgctgcaaatacatagaagttatcccagtttatcatacgctttagctccgtttataaataaaagaactgctcctgcaagcatcatcagaatacccgctaccatcacatatttccagggctgttttacgacctgtagaatgcagtaattgctttcgttgccttttgttacgtcgtatccggtgaggtagacgtcttcccccagtcggtaggaatagggatggtttacttccagcagaacgttctcattccccaaacgtacattggcggaaaagcgggaaggacgtccgttcgggtaatattctacagcgaacgaattgagttccatatcataatctaaatagtaagatgtgccattcatgtcgaatgcctcgtgtgtcggttcacctttatataaaggtatgcgtaatgtctgcgtgtcactgctacccagaaatccagcaaacagagccagccataaacctgtatggttcagaataaagcgccagcgtgcttgtttgcgatgccgacaggcgtggatggtgatcatcgccagattgcttaataataataagagtatagaaatgaatatccatgaagtcatgaaattgtaacatcccaatgaggctgatattccattgcgcatttctgcttccggttcagatagttgggggaaaagtcctatgatcaggcaaccaccgataaacaggctgatagataaaacgctggctttggatgaaccgagaaaacgggtgattcttagattattatattctttatatagtatccataacaggaaaagccagatcgccgcaaagatgatattcagcggaaaggcgagaaaagaaacaggaaagtttcctgtgaacagctgcatggctgctgctaataaaatgtaacctgctacatatacatagtacatattcgtgcttctgttttgttatcttttgcaaagtaaagaaataaaaatgaatattcatataaaatctttataaaattgtaatcgttacaagtagataatgatattaatatgagtttagggtaatccttcagtgtagttgttggtgaaaggagagaggatatggaagctaaagctacgctttacaaggtataaagctatgcttttcactccctaaagcatagccttatgtcttgtaaaacgcagtgttttatattggacttaccatagcgggagtagtcgatacaagaggtagtggaaagtggagatttataaaattgaagctgtctgataaaaagctgattgatataggaaagtgaaatctgtaataccaaaaataaagaaggtgaattctaagtcctctccaaacaatatctataaaatcttacccaagtttacgaacattaacgtatccttgggtaagtttgtatatagacatacctactcttcagaagtgtatagctacttcctaaacctaagatattttcgaagttaaggacctttttattatacggctaatgttacaaatggagtctgccttcgtatcacagcaaaagaccttgctatgattttggctcttacagcattgattacagatgctttatgtttcccctctgctattttccttttatagtatgctttcatctgcggatcccaagagatggcagtaatagctgcccgggtaaggtatacttttacttctttgttagccaatgaagaagtctgcgtttttccccgtatggaaatacctgaagtatgttcaaatggggcgaccccacaatagcaggcaaatttcctcgggttgtcaaatctttgaaaattgtcagtaacacacagtaatacaatggcattgataattcctattccttttatacttcttaatagcaagtagtttgtgtaaagcgatgtactggcggctattagttgctccatatcctcttccacctccaggattctttcttttatcgacttgagctgctcttccaaaaaagaaatggattctgtcacatcagccaacttagccatccaggagaatgtttccaataactttatgcttgatactttttgcttaaccaaattgtcacgtataataatccatccccgcagtctcaccaagtctttgtcaggcaatttgtataactccagttttcgatagtgtaataccgcatagttcgctattcttttggcatcaatgcggtcatttttgcctcgttgcaagcctatggacttcttgatggtcaacgggcaaaccaaagccagggaaaatcccatggagacactggaaacagataactctgtgacataacttcccatgttttcagcacagaacaagagtttggataaagagagatgataaccagctatccaatccaataaagattggatcccagttggagtgttatcaaaagacttgtgagacaactctttttcgtctgtggacattaatgatgcatcgaaagttttttttcctacatcaagacctacaaaatgagaataattcataactttgtatttacagtattaaacatgaaggagaaacagctaatacatttattaggtcgtgagcctacaattctaactggctaggttctcctattaagagagttgcagtctgattcagcctatagtcatttaagactagtgtcaaagttagttcactgcaactctacttttcaaatatacacttatattttgttgcgatatttaatactgcaaatgtaaatgtgtcaaaagtcaaaagtaactaaactctcctccttcaggaaggaggagtacccgtagggggaggtggtaggtaaatacgtaagctgttgatattcagctatgaaatatacctaccaccccggctttcagccacccctccttcctgaagctaccctttatacacaagtatatattattttttttatctttgcttgatgttattagagacagatcaaattcgtgatcctcggcttttgcggcgtttaaacttaatttgctctcagatggttgtccatcaaagtgctatagtgaatcaatttagtaaggaacataaagaaaagatgggtgcttatagatttttgaacaattcctcagtcagctctgatgctatcttatcaggtctgatacacacttgctgtaagaatgcttccggtcgtaagcatttactgtgtattcaagatacctcggagataaactatgaggctcatgttgagcgaatgaagaaaaaaacagccagtcccggcattgtcggtcaaaagcaatgtggtacttttttgcatcctgtcttggtagtggatgcctccagtcatattcctataggcttttcttcggttaagcagtggaatcgctcaccggctgctttaagtcgtgaagaacgtaattacagatatcagcctatagaagaaaaagagtcatatcgttggatagaaagtggaatggctgccagtgagcaaatgccccgggatgcagttaaaacgatcatcggtgaccgtgaagcggacattttcgagcttttcagccgtatccctactgataatgttcacttgctgatacgttctgttcatgaaaggaattgccggttggatgatccagactgttctgtccatctgaatacattaatggagcaggctgttctacgggcagagtatagctttgaagtgctcccgggaagcggacgtaagaaacgggtagcgtgcatggaacttcgctttgaaagagtcaccttgtgcgctcctgttaacggtccggcaaagggcagtccccctgttagtctttattgcatacatgttaaagaaaaatcttccagtacaccggtaaatgagagccctattgaatggagactgctaactacacatgtggtggagactgtagaacaagcaattgaatgtatcggttggtatcgttgtagatggctgattgaagagttgttcagagtgctcaaaagaaagggattcatgattgaggacgcacagttggaaacagtttcggcattacaaaaactaatcttaatttccttgcaggcagccctgcaggtgatggtactcaaactttcttttgataaagaagatgaaaaactctcttcagaaatctactttacaagcaaagaaatagcattattacatatagtaggaaaaaagagtgagggaaataccaaaatacagcaaaatccatataaaaaagaatcaatggcatgggcagcatggattattgcaaggttaggagcatggagtgcatacaagagccagtccattccaggatatataacctttaagaatggactggatagatttaatacacagtttgaactgtatgagttaatcagctaagacttgtgtataaagggtagcttcctgaaggaggagagtttagttacttttgacttttgacacatttacatttgcagtattaaatatcgcaacaaaatataagtgtatatttgaaaagtagagttgcagtgaactaactttgacactagtcttaaatgactataggctgaatcagactgcaactctcttaataggagaacctagccagttagaattgtaggctcacgacctaataaatgtattagctgtttctccttcatgtttaatactgtaaatacaaagttatgaattattctcattttgtaggtcttgatgtaggaaaaaaaactttcgatgcatcattaatgtccacagacgaaaaagagttgtctcacaagtcttttgataacactccaactgggatccaatctttattggattggatagctggttatcatctctctttatccaaactcttgttctgtgctgaaaacatgggaagttatgtcacagagttatctgtttccagtgtctccatgggattttccctggctttggtttgcccgttgaccatcaagaagtccataggcttgcaacgaggcaaaaatgaccgcattgatgccaaaagaatagcgaactatgcggtattacactatcgaaaactggagttatacaaattgcctgacaaagacttggtgagactgcggggatggattattatacgtgacaatttggttaagcaaaaagtatcaagcataaagttattggaaacattctcctggatggctaagttggctgatgtgacagaatccatttcttttttggaagagcagctcaagtcgataaaagaaagaatcctggaggtggaagaggatatggagcaactaatagccgccagtacatcgctttacacaaactacttgctattaagaagtataaaaggaataggaattatcaatgccattgtattactgtgtgttactgacaattttcaaagatttgacaacccgaggaaatttgcctgctattgtggggtcgccccatttgaacatacttcaggtatttccatacggggaaaaacgcagacttcttcattggctaacaaagaagtaaaagtataccttacccgggcagctattactgccatctcttgggatccgcagatgaaagcatactataaaaggaaaatagcagaggggaaacataaagcatctgtaatcaatgctgtaagagccaaaatcatagcaaggtcttttgctgtgatacgaaggcagactccatttgtaacattagccgtataataaaaaggtccttaacttcgaaaatatcttaggtttaggaagtagctatacacttctgaagagtaggtatgtctatatacaaacttacccaaggatacgttaatgttcgtaaacttgggtaagattttatagatattgtttggagaggacttagaattcacctccttctatctgaaacagaataaaattctttttattttttcattttcggcatcatcttgcccattttgctgctggttaccatcttcatcattttgcgggtctggtcgaactgtttcagcaaacggtttacttcctgaatcgttgttccgctacctttagcgatacgtgtacggcgtgagccgttcaatatttccggattggaacgttctgccggagtcatggaatagatgatagcttcgatgcttttgaaagcattgtcatcgatatcgatatctttgatagctttgcctacgcccgggatcatggatgcaagttctttcagattacccatcttcttgatctgggcaatctggctgaggaagtcgttgaagtcgaactgattcttggcaatcttcttttgcagacgtttggcttcttcttcgtcatactgttcctgagcacgttctaccagcgaaacgatgtcacccatgccgaggatacggtctgccatacgtgccgggtggaactggtcgatagcatccagcttttcacctgtacccacaaacttaatcggtttgttgactaccgaacggatagaaagagccgcaccaccacgggtgtcaccatccaatttggtcagtaccacaccgttgaagtccagacgttcgttaaattctttggctgtattgacggcatcctgtcctgtcatggagtctaccacgaacagaatttcgtccggattgattgcttccttgatagcggtgatctcgttcatcatctgttcgtctacggccagacgtccggctgtatcgacgattacgaggtcatatcctttggctttagcttcttgaatggcgtgttgtgcaatctctaccggatttttgctgtccagttctgagtacataggcacttcaatttgttctgccaatacacgcaactgttcgatagctgccggacggtaaacgtcacaagctaccagtaatggtttgcgattcttctttgttttcagcatgcgtgccaacttaccggagaaagtagtcttacccgaaccttgcagacctgacatcaggattactgccggacgggattcgaggttgatttctaccgtctcgccacccatcaactgggttagttcgtcgtgcacaatcttcaccatcaactggcttggcttcacagccgtaagtacattctgaccgatggctttttccttcaccgtgtcagtgaaagtttttgcaaccttgtagttaacgtcggcatcaagcaatgccttacgtacatctttcagcgtctccgccacgttaatttcggtgattttgccttcacctttcagaatcttgaatgaccgttctagtctttcacttaaattatcgaacatagttatttaattacgaattaattatttgagcctgcaaatgtacaaaaatctcttgtatttatatctttttattctgccattttgcttttttgaggtaaatatagcttgttatcaacagcaaggtatagtacagaatctcaatcgtaaagcagatttcaatcggtgctttgagccacattccgacgaaaacgatgtaggaaccgtaaatggcaatcgtgatggtttcgagcaacagggctgcctgcgtatttcctgttccggagatgccgttgaatacgacattggctactgatgcaatgagcatggcgcagcagataacgtataccgaaggcacggactcggtgattaacgctgcttcgctggtatatacggagaggaggaactgaggaaacaaaaccgacaatcccaccagtcccagcatgatgaagaacgagaatcgggctattttattgataagcggcatgacgtattggatacctcctgcgccgatggcattgctgacaaggctgttggtcgttgttgccagtgcattcaccggaatcagcagtacgacgtagatactacggacaatgttggcaatggccagttcccgttgtcccaaccgttctacggcaacaaagaacacgaaccaggtcgccatcgataagaaatattgaagcatcgtgaagcaagaaatgctgagaatacgcatcagcaatgccggatcgaacgagcgcagacgattcagaccatactttttcaaatcaacactgatatatgtatagatcaggaagaagagaatggaagaggcttccgccagtacagaagcgatggcagctcccttgattcccatttccggcagaccgaatttaccgaaaatcagtgcatagtccaatatgacgttggttaatgccatgacaacagcattgatggtcaagaccttggtacgtgtgatgccgatgtacagggcacggaacatgacattgacaaacgagaagaagaacccgtaaatacgccagtccagaaactccatagtgccttcgtagatggattcggaagaaaccagcaaccgcatgatatttcctccgaacgctttggtgaagccgaacatcaatatagctatcaacaggaggaacataatcccttgaatcattacgggacctacatcactgtagcgtccttctccattgcgtcgtgcaatgacaatttgtgatcctgtgctgaatccgaaagcgatggtgaatatatatatataaaatagtccacccatagccgaagctcccagggccacttcactaacgtgccctaagaatgcggtatcggtgacattgatgacattttgcgccagcaagctgagtagtatcgggtaactgacactccaaatctgtttgttggtatacataattaagcgtttaagtttacagtttgcaaagatagcgctttattccgattctgaagcaatgggataggtgaaaacaatttccgggccttccgttccccgggcgtttacctgatagcttcctccgaagtaagccagcaataactggttgatctcatgcctgatgccggtctcctgtgaggtgaaagcctcgtccgccaatggagagttgagaatgcggaaataaagcatttcgcctttccggcttaatgtaaagcggataatccgttcctcctcatgttcatgcggataggccagggtactgagcagagcgtatcccaatcgggtggtatctgtgcgaagggacagtgactcgacttccggagtgaagcggatttgaatacctgtcttttcattattcatgcgtgccatgtagcatacttcgttgcaaagtgagacagcatcatagtcttgtatctggaacttcatcattttggcttccagacgagacaggtcgagtacatcattgaccagtctcattaatctttctgagctttggtggatgatcgccgagtattcttctcttgttttttcatctatattcggttcgctggctatgagttgcgagaaacctaccacgttgttgagcggggtccggatgttataactcatgtttgacaggaagcgattttttatttcgttggttacccgtaccgtttccgctgctttgcgtatttcgctctcggaatattttagggctttgcgtattttggagagccggaatagggaaataaataatacgatcagaatggcactgattacgatcaggctgatcagacgtatttggttggtctgcttttgttgttccagttctatcttgtccagattatagctttttttgatttgctccatttgggtgttggagagtgccatggcagccgagtccttgatggccagtgcctgttggtagagagttgtcgctctgttattatctccggcttccacccatattttagcctgtttcagcagttgttcggcatagtcgctggtgaaatctttcttgagcatagttaatgtcgtgtcgatgtaggctgatgcctgctgatattgtttgatactctgatagtatttcgcatagatgtcgtagtagagcaccttatacatgaaataggtattttcagtcagatactttttagacttttctatatgtgaataagcaatttggggctgattggtattcaggtaataatgcgcatagaaaatctcattgaaaatgaatacgtctgcaaatccgtcttttagagatggattgtcaatgatgaatttacggagtacattttccaactcttgcaggtattttagttgcctgtaattgtccttcatttctttggttacggatatgagctgtgacaggacggagatatggactaccgcattgccattctttggaagtagcctgtaggcttcttccaatgctttgagcccctcgtcccagcgctggctgccgatatatgcgttggacaggcactgataagcagctaccgttccacggttattgtcaatatcaagggctttctgtttcatcttgtttgcttcgctgatggcaagctcatattgttcggtaaaggtgtataggtcaatctgaaagcgtcgggcgtcgaagaaataatcccataaaccggatttttgtaccaacggttccatcttgactatccatttggctacactatcctgttcgcaacggttgtaataatacaacaaatgataataagcggctaaactggcatacttgtcatttttcagttttaacgcttcctgcatcagcgaatccgaatactggatacatttgtagttgttctgctctatcttgataatgtcgttcagggtagagaggcgtgtggtgtcatgcggcagcgtttgcaacacttgcagcagactgtctgaggctgtatcggtgtttgcatagcccgacagtaggccatagcaggtgatgatcagtaatatcagtcgtttcatcgtgtttcctccttctttatctgcgcatggcaaatcgggtgtgtgaacagaaaacgtgctcctttgtcatagtccgggtcgatccatattttgcctcccagttgctcgatgataagctggcagatagataatccgagtcctgtgccttgagcgttttcatcgagcttttcgaagcggttgaatatcttgttctggttctccttggagattccgcaaccggtatcactaacggagaaaagggccgtatcttccgtttgtttcaccagttccagggtgatagtgccttgtgcagtaaactttgtggcgttgataagcagattgatcagtacttgttgcaggcgggcactgtccgtggtcagcttcagtgaactgagagaggtggaaaaccgtacttccgcttgagtctgctttattttctctaccatgtcgatgacatttctgcatagcgctacaatatcacactcgttgaatttgaattgcatttttccaatttcaaggctggataagtcaattacatcattaatcagtttgagcagcagttctgagttctgctggatgatatcgttgcactgttgtttcgtttcgttgtcgatggattcttctgtcagaatagctgaaaaaccggataaagcattgagcggagtacgaatctcatggctcatattggagagaaaaaggcttttggtgtggatagacttttctgcttgtttcttggctttttcctgttcctgttgtgattgcagaagacgattgttggtgcgcttgatgcggaaaatggcaatgatgatcagtactacgatcactaagatcacagacagactccaataatagagatttttttgtatgttgatataattaagttcgcttttatctatctgatacagggtatgcagttcgtttatctggctgagataactttgggcgtccaatgaatctttgagatgattaatctcctcataaatcttgcacgcctcttgtttctgattcataagtaccaggactttggcgcgttcctgtaataactgaacatgtctgaataaagccgttttctttgttatggtgagtaattcttcatattctttcagcgctttatcatattcttttgactcaatatgatagccggcatacatatagttgctgattgaagaatagtagggatacggatatttttcgtagatggagtccagctgtttcagatactccagtgcttttggaaggttgtttgtctgtatataataataggcatagctgcaaggcagatagaagtcatcgggcaaacctgattctttatggtaaagagactccagataggcaaaatctttttcgatatctgtcatttgcctgtatttgagtttgctcaggatcaaatgaaacatgcttgtcttaagatatggaatacttgccggaattttttgcattattttcaaggattcctcataagactttatagcagactggggatttcccgaactttggtaggtgtctgcaagggcacgcaatgccagtgccgttccgaaaggataatctatagctttggcttgctgatacattgagttggcgttgttgactgccagactgatatttccttccgtaattaatgcctgaactgccatcattttcaatggaaacagaatatgatattcttgctgcttttcaagttcggggcttaagagcttttcccataagatgatgctgtccgttgtaatatcgatatttgtattgaaagaaagatcatgctcgacaagtggctggagtaaggtaagtcgttctttgttcaggtttgttgcatggagagccgccgatatgaatatggctgcaatgagtgctattatatgctgtaaattactattcactattttgtttgctcgtatggtgatgtgcaaaagaaataaaaagagcgaagactggcaagcaatcttcactcttttttatagaattattttcttttgaggatctcccgtgccccaggaccttcgtggctggggtagccgggagtatgatttctgcaccggggatcggcatctaccttcaaactgcggtaatcatctttggaacgtgtgatgtaatcgtccagcaaagcacgatgctcggcgagtattttggagtatttagggtctttggcaagattttttctttcacccggatcttttttcatatcgtacagttcttctccgttgccttccagataatgggtgtatttatatctcggtccgcgcaccatgcgtccgggagtggtaacgtactcatattcgctgtgccattcggagacaacataagggtggcttttcttttgtttctctccccttagagtcggtgcaaggctgatgccggctttttctgccggaacgacgatgcctgccaggtcgcaaagggtgggcaggagatctaacgtcggctgtgtcagcagatggtctataggtttcttctgctgcttgatgccgggaccggcaaagataaacggaacgttggtcatttcatcatagaagctgatatgcttggtcaccatgcggtgggatgccatgccgtcgccgtggtccgccataattacgacaatcgtgtttcttccggcaggggtggagtagagggctttcagtacgctgtctacttgcttggacaccatcttggtgtaatgctggaaggcggcgatgtagtgacgatagttttcttcgttccaatgggcagcctgtgtcatgcggcggtgactgcaacagatatattgtacgggagtcggaatattgctccagtcttccacatcaaagttgtccggcaattcgggcagcggtccgctgatcggccggtcggtgtgtactcctgcgttttcgccgatgaatccgcagatattatgcgggttctgaaaatctgcaatgcagataaaaggttctttcggaggattgctgaggtaggcaacggcatcctcgcaggttcctacatccaggaaactgtcattgttgaccggaaattcgggatcggtgaatggcttggctaccggttctttatgtttgaagcctctcagtgagcccatgtcgtgagtcttgccgaagtgtacggcctcataaccgttttcggagaagagactacccagtgtaggtacgttttccggcaggcgggtgttgacgggttcgctggaatttgaacgtacattggtctggtgaggcatcatgccgctccataatgctgcgcgtgaaggttggctgagggggcagcctacataagcgttagagaagattactcctcttgatgctacttcgtcaatgggaagtgtgcagccttgtgtatgtccgtaagcgcctacgacacgttgtgtgagatggtcgcactggataatcaggaagttcggcttttcttgtgcctgggctgctgcgccacaaagggctaatcccatgaatggataaattgttttcattcttggctagaattaagtaattgattgggtagcaaaagtaggaaaaaacaaaaagcaaaaaagggcgggggagtggttttggacgtaaatgaaagtaatttgtacaaaaatgaaatatgcgatgaacgattcatgaggaacagcgaagaccgcgatgaataataaatgaaaagaattaatggaaatcataaaaagaacggtgaataaactacgattattcatcgtccagtatattcaccgttccttatttatgatcgtttattcttgatcagctattcatgctcatcaggaattcgtcgttgtctcttgttttttccagacggtcttttacgaaatccattgcttcgataggattcatatctgcaaggtatttgcgtaatatccacatgcggtcgagtgttgtcttgtcaagcagcagatcgtcgcgacgagtactggatgcggtgatgttgacagcagggaagatacgcttgttggacaggttgcggtcaagctgcaactccatgttacctgtacctttgaattcttcgaagataacttcgtccattttggaaccggtgtcgatcagtgcggtagcgatgatagtcagcgaaccgccgttttcgatgttacgggcagcaccgaagaagcgtttgggcttgtgaagtgcattggcgtccacaccaccggaaagtactttaccggatgcgggagatacagtattgtaagcacgtgccagacgagtgatagagtcaaggaagatcactacgtcgtgtccgcattctaccagtctttttgctttctcgagtacgatacctgcgatttttacgtggcgttctgccggttcgtcaaaagtagaagcgattacttctgcgttgacgctgcgtgccatgtcggttacttcctccggacgttcgtcgatcagcagcataatcatatatacttccggatgattggctgcgatggcgttggcgatatctttcatcaagatggtcttacctgtcttcggctgtgctacgatcagtgcacgctgtcccttaccgataggagcgaaaaggtctacaacccgggcagacatggagtctgaataaccgcctttgcagagtctgaatttctcgtccgggaagagcggagtcaagtgttcgaaaggaacacggtcgcgaacgaaagctgcgtcacgtccgttgatctttgacacctttactaacgggaaatatttttctccttcctttggcggacggatgatgccttctaccacgtcaccggtcttaagaccaaataacttaatttgtgactgtgatacataaatatcgtccggagaagaaagataattgtaatcggaagaacggaggaatccgtatccgtcctgcatgatttccagtacgcctactccgctgaggatatcatcgaattcataaggcttttcacgctcgatcactttgcgttccggctgttgttgtacaggcggaaggttctcggcagcgttgttctgctgttgtgcaggacgttgttgcatcagaggacgctggttgttgttattattacgctggaaattattattgttgttagcatttgcattgttattgccggcgttgttattgttgttgtcgcgcgggcggacaatgcgctggcgttgttgcggttgtgaatgctgttgttgctgtggttgtggagcttgctcgggggcggcttgtgctgtttctgccttggtcgcttcgaatttgccgaagagttcggtcggaagctctattttttcagaaggcaggtcttcgattgggataaagtcatcatcgtcttcgctggataagatggtgctttcttcgtcgatcaccggtgccgatttcttttgcggtttggctattaccggtttttctgcaacggcaggtttgttttcttttactttcttttctgtctcctgtgtcggagttgctttttcagccgccggtgcaactaccgttttttccgcaacagctttttcttctgttggtttcactatcggttttgcgttttccacctccttgttttctgctttttcagcgatattggcgtctttgcggggacggcctactttgcgcttaggagcagctttctctgccttcggttcagcaacgggagcttctttggctttgttggcagcctcttctttaggctgttgctgaggtttggctgcaggagcattttctttatttttagtaacttccgcatttttggctgcaggtgctactttctcttcttttttaggtgcggctgtgcgcgaacgcttgtttttatctcctttgcgttcttcttttaatttctctgcggcaactttcttagtggctccggctatggcttgctcatcaagaatcttgtatacaagttcttctttcttaaatgagtctgcttttttgatgcctagctctttggcaataacttgaagttccgacagatttttgtcgttcaattggataatgttatacatatagtatggtaagttattaaaatttctgtcttgatgaaatatggacagcattactacagcgtaataaccgcagatatgcgagcatatgttttgtttttaattatgaattagggatgtatgtgttgaatcgtagaatgtttcaacggggcaaagataataaatatttttggtttcatgaacaatcaaacacttttttcagcgtaaaaacgtatctttgctgtataaaagaaaatagtatgacagtaaatgaagctcgtttaatttatttttcgcctacacacacatcaaaacaagtagccgaagcaattgttcacggaaccggtataaaaaatgtcgtttcgatgaatctcacattgcagactgtcgaggaaactgttattcctacgtctgcattagctgttatcgtagtgcctgtatatggaggtcatgtggctcctttggctatggaacgtctggaaagtattcgtggtctggatactcctgccgtattggtcgtggtttacggaaaccgtgcctacgagaaggcgttgatggaactggacgcttttgccatccctcacggattgaaggtgattgccggagcaaccttcataggtgaacattcatatagcactgacaaatgtcccattgcggacggtcgcccgaatgaatcggatttggattatgcagaagatttcggaaaaaaaataatggagaaaattcaggcagctgccggatccgataccctttatcaggtggatgtgcgtgccatcaaacgtcccagtcagccgttcttccccttgttccgctttttgaggaaggtggtcaaactgcgtaaaagcggaactccgcttccccgtaccccttggatagaagatgagagcttgtgtactcattgtggcatctgtgcggctcgttgtccggcaggagcgattaccaaaggggacgaactgaacacgaatgctgaaaaatgcatcaaatgctgcgcctgtgtgaaagcatgtgcaaacaaggcaaggaaatatgatactcctttcgcttctttgctgtccgagtgtttcaagaaacagaaattgcctcagactatcttgtagataatcactcgtttagtcgtttcgtctatccggaagcggttatctgtccgttcgcctatcagccatgcaatgcgttcaccgcagcagagaacccattggcgttctttttggctgatggagaatttgcggtcggtcagataatcgcttatttttttcttgcccgtcatgccaaaggggatgaatgtatctcccgcttgccatttgcggcagtgaatttcctcatttaatttgtctgcatcgaaacaggcggtttctttttcccgtggaatccggaaatcgggtgtgaattctctttcctcttttattaattgatagggaagggtagattcgtcttccggccggatggtttccagtagcagcaaattccggtctttaatgactcgccattctttgctgacgaattgtttccctgattgtccgtgaagcgaattggctatatctttgatttgtgccgaattgaatcccagtggatgcaatgtttcaaacaagaaagcatcgggagcgggttcgtccagtagagcatcgattcggataccttccggagtgataatccgtgttttggcttcgtctattaccttattatatatagtagctacatcattcaggtgattgcttgtttctatcagactgtttttgaccgacggatttatttcctgcatcagtgggagcaggttgaggcggattttattgcgggtatattcgtcttccagattggtactgtctgttacgaagttttgtccgatctgttgcaggtagcggataatttcttcccggttgatgcagagcagcggacgtacgattgccccgtttcgggggcggattcctaataagccggtgatgcctgtaccccgaatgaggttgagcagcatcgtttctacactgtcgtcctggtggtgagctacggcgattacatgagctccgcactcttcttttatcttttcgaaccagttatagcggagttccctggctgccatttctatcgagatccgtttttcagttgcgtactgagtcgtgttgaagtcgatggtatgcaggcggatgccgtatttttggcaaagttgccggacaaactgttcgtcacggtttgattcttcaccgcgtaaatggaaattgcagtgggcagcttcacattgataacctgctgtgtggagtacacgcagcaaggcaactgagtcggctccaccactcagggcaaccaaaagtttatcatccggcgagaataaatgctctttctctatatatcgtataacccgttgttgtatcatatctgcaaagataatagtttattgaggtatctcaagtgaatgctaattgtttttatcggactgactaaggaaaaaactcccataaattatttttttctttagcgatttctaattcgtcctactatagtttctctttcgtgccactatagtaggacgtaaggggaactatagtacttcttgcgtaccactatagtggcacgaactaattgttgcatgtaaattcaatagatgtaggcagggaattagttacctgttgtggcttggacttttgatggatttatttagataccgtcagtatacgaaaatcctgctatttaaaaacattctaaataatttgcgtgctcggaagttatgaattatctttgccgaaaatttagatagttatgcgtttatccgaattaggaacaggtgaaaaaggtgtcatcgttaaggtcttgggacacggaggctttcgtaaacgtattgtggagatgggttttatcaaaggtaaaactgttgaagtgttgttgaatgctccactgaaagacccgattaaatataaagtcttaggttatgaaatatctcttcgtcgtcaggaagcggaaatgattgaagtagtcagcgaggaagaagcaaaaaaacaagccgaaaaagctgtatatcacgaaggtttgcccgaagatgtttctgtaaaagaagaagatatgaaacggttggcgttaggtaagcgccgtactatcaacgttgctctggtcgggaatccgaactcaggcaagacttctcttttcaatctggcttccggtgctcatgagcatgtaggaaactatagcggtgtgaccgtagatgccaaagaagggtatttcgatttcgaaggttatcatttccgtattgtcgatttgccgggaacgtattcactgtcagcttatacaccggaagaaatttatgtccgccgtcacattgttgatgaaacaccggacgtaatcatcaatgtagtcgattcttcaaatctggaacgaaatctgtatctgactacccaactgattgacatgaatgtccgcatggtagtggctttgaatatttacgatgagctggaatccagcggtaatacattggattatcatttgttgagtaaattgttcggggtgccgatggtgcctactgtcagcaagaagaatcgtggactggataccttgtttcatgtagtaatcaacctttatgaaggggtcgatttctttgacaagcagggaaatatgaatccggaagttctgaaagacttgaccgaatggcatgattctctggaagaccggaagaaccatgaggaagaacatctggaggattacgtgcgcgaacataaaaggaaagggcgtgtattccgtcatatccatatcaatcatggtcccgatctggaaaaagcgattgacgctgtaaaagaggaagtatccaagaatgaatttatccgccataaatattctacccgctttctgtctatcaagttgttggaaaacgatcccgatatagagagctttgtacggacgctgcccaatgcgggagagattttccgtattcgcgacaagatggccaagcgcgttcaggaaacgatgaacgaggattgcgaatccgccataacggatgccaaatacggttttatcagtggtgcgctgaaagagacatttactgacaatcatctggagcaggcgcagacgacgaaggtgctggatgctatcgttactcatcgtatctgggggtatcctatctttttccttttcatgtacttgatgtttgagggaacgtttgttctcggagaatatccgatgatgggaattgaatggctggtggggcaaatcggtgacttgattcgcaataacatgtcggaggggccgttgaaggatatgctggttgacggtatcgtaggcggtgtaggtggtgttatcgtctttctgcccaatattctgattctgtatttctgtatttcgctgatggaagactccggttatatggcccgtgcagcgtttataatggataaaattatgcataagatgggcttgcatggaaaatcgtttattccgttgattatgggattcggttgtaatgtgcctgctatcatggcttcccgtactattgagaaccggaaaagccgtttgattacgatgttgattaacccgttgatgtcttgtagcgcgcgtctgcccatttatcttttgttggtaggggcttttttcccgaacaatgcgagtttggtgttgttaagtatttatgcgatcggaatttttctggctgtgctgttggcgcgtctgttcagcaagtttttggtaaagggtgatgatactccttttgtgatggagcttcctccttatcgaatgccgacggcaaaatccatattccgtcatacatgggagaagggagcgcagtatctgaaaaaaatgggagggattattatgattgcttctattatcatctggttcctcggatattatccgaaccatgaggcgtatgagacagtagctgaacaacaggaaaattcttatatcggtcagttaggacgggctatagagccggtgataaagccgatgggctttgactggaagttgggtatcggtttgatttccggagtaggggcaaaagagctggtcgttagtacgctgggtgttttgtatgtggatgatccggaggccgatgaggctagcctggcggaacggattccgataactcctttagtggcgttctgttatatgctgtttgtgctgatttacttcccttgtattgcggcattggcggctattaagcaagagtccggcagttggaagtgggcgctctttgcagcttgctataccacagggctggcctggctggtggcattttcagtttatcagattggaggaatgtttgtatgaataattggcaggaatgggtagtcggagtactgattgtactctgcattgcccgtgtaatatatggaatttatcttttttttcgtcgtacgcgagaaagtgagaatccttgtgatagctgcgtaagtggctgtgatttaaaggatatgatggagaagaaacgtcaagagtgcggtgtaaagaaaaaaagtacaaagaaaaattgctgcggatagttggtagtttcaaaatttgtactacctttgcaaccgcaaacgagaaaaaatggttccttggatgagtggcttagtcagcggtctgcaaaaccgtgtacggcggttcgaatccgccaggaacctcataaaaccctttcagatgatctctgagagggtttttcttttctcttaatccaaaatgttcccactttgttcccagcttttgattaataccatgatataaggatggtgttttgagaggaaggctgttttttattcttctatttcttttattctttcgatttgtttattcaagaagtaatcagtataaagagaatattctccagtttcgcaaaaagatattaatcctttcttgtagttcaagacattaaaatagcaagattcttaacttcgctatgataaagctcagaaagctttgataaagggctttcgatgatgaatgcagctttatttatttgttcttcattaaatatctgtttcatgtattccaattgtctcactattgtttttatccttgaccgacccttgacatcattaggggaatttgtcggaaatggcggtatttcatctaaattgaaatcctaaaagggacattggagatatttactggtttatttttttttcttctctccaataatcgtaatactgcatgggattccacctttcagcatttctgcgtggataatgaccggattggcatacataccgttctgacattctatgctaattttaccatttttgtcagtttgtatagtaggattccaataaagtgtacggcgacgatggttgacatttgcagtcggtattttgtctttgtagacaggagaatagaaagctaatgggcgagaatatccttggattattgtacgacgtgttccatgggcagccttcattgacttttgcgttaatctgctataattggagtcaaaatgcggagttatgtagaataaagcatattgtccgaatcttgaaaaatcgatattgacgtttacattattgttgattcctgatgatttctttctaaaaaggggttctgatttggccttttcagtatcgtctaacgatatttttttctttgcagcatctccataaagatagaaactgtcatcaaaggtacgtgggggattcattgctgtcatcatgtcttttacattttgtccttttgtcatatttgaaccgtgtattgaattaagcacttcattagtatacgaattgcttccttcgcatatcataatctgttttataccatctatctcattccacaatgtccaagcagttaaagtatcaagtacttgtttgccaacaatgagacagattgttttctctttatatcgtgagcttccgtcttgcacatcgtatgaaaagttaggattcactttactaagcaagtcaggtatagtattaattactattccctgatcgcgtaattcatcaaccaatcgcgttacatcatagtatgcgtctacgcttttctcgaatacttgagtagtgatgttcttattttttcttttttttgctatttccacttcgctcaataaataggtgttgttagttttgctaatagaatctacatatagcgagtctatacggttggaaagggtgatccatgagtttttgtccatccactgtggatgttcttcttcatagctgaaggcgcgtggggtaggggcgaagttacggtcgagcataacagaagcatctttcttatgtttagatcccctacggcgtatctggaataccgcttctacttctccttcaaaactagtaaccggaagttgaaatttgccgttttcatctgtaaacgtatttcctgctacaaatgtattgtccactttagccatgacgcttacctccatatctttcatttctttttttaatagagaagaacgaatctgtccttgtagtaacaactctttttcagctgactgttgaagtagcttttcatttttaccggaaataagttgtgataagtcatattgacgccaaccgtgaaccatgagcaaaacatcaagttcttgcaatttgcgaagtgtaatatctgcaaaataataccccggtttatcaatatatccttttaaaccggatgttaataacatatctgtaaatatattattatcatattctgcataatccgaacgtatagcatctcttactgatatggataaagaaccttgtaaaggatttcctttttgatctgttacttgtatttcgcagcgaattgcttcgaaaggccggtaaatgtctttaattccatttaattgtattgaattcaatttattgggttgcacaaatgtaaatcgttcgcacagcatattcccggttttgtctagtagactgacttggtatatgcctccgggaagatcgcgcgttttaagtaagaaagtttgatttccacctgatctcattcgtagtatccaatacgaataggggcgaccttcatgacttatgaatgctacaatgtctgcatccggggtattctcattgctcaatacgttacctacaatagctccgcttgaattattcacgttcaatacatatccggcggaaagggcgtccggtagattgaatttatattctttttctttataagttactttagctactgctggtttttcttcgggtgtataagtgaatattcccattccgtcatgtagggtttttatttctgtcagcttttccccgtctttcgtataaatggcaccttcaaggataacattaccatcttctctactttcagctttaaatgccacacgagaagagatgcctttcacgagtgttcctccttcgggaaagaattggatagcaagtttatctgtcacatttttcggtcgctgtttcatggaaggattcagattataggtcgaaatcctccgttctggtctttctccttgtgcagactgatagatcgggaatgtacgtgagaagtaagaaggttcgctgaatgcgagcatccaacgggtgtaagctctgatttcataatagccggacatggtactttcattcaggattatctgtccatgtccttcaccgctattcaattcaatgatttggcgttgggtaatatgccctgtctggtcgagcatttctacataaaggggtttgctgatggtgcttggcatattgttctcagcatataccgtgtaggctttaaaccatatagtatctcctacataataactactattatcaaaatgcaagtataccttctcacgtgggtatgtgtcagcaaaagcaacggcattatcgaagaactgtttgaagatgatgtcgctgctagcgttttgtgaacggagaaacaaaatgctatgtagactgcaaaatagaattaaaagtattcgtttcattattgtgacatgtaaggttgttaatcatagctaaactcattgcaactaaacatgatataaatttctttgcttgtatattcttgatagataccgtgtcgcactgcagttttaaattcttccgaaacattgcctgcgtattcagctgttatgagatattctccagtcttcctaaattttggaacagtaacttcatatcttccgcctactaattggggaaaaactaaatatccatcaacaagcactcttacagaaaaagatgagccacgcttaggatcattaattatgaattttagtgattccatattgttgaaatcctgtgaattataaccataagggttattataagttggctgattgtaatctttataatgccatccagttgcaaggtttttattgtaccatttttctttatcattaatacttttatctgctttccctgggaaatctttatgcaacaatctatatctaagctgaactctagtaggcaaatgtgtagcatttaaatccataggatcttgaaatccattgactttcactattccataattataattccccgggcccccttcacctaaataacgccaaggaaatgcagtagtaccacttattagcctatgttgtacttgcatatattgataatccatccaattagcttctgtaataggaggataacaagtccaaataatggtcatataatatatgcaagtatcaggaccatgtccagaaggaaaatcacgacaggatacctgatattcatatagagcaggtagcgcaccttctctatctttccaccaatccatcccctcttcatattcttgtttagtgaagaatgtattagtagcagacgttgagttggatattgtgttgtctttaccaagcatagtactatctgttgctacatctgaacttattaaagtattgctttcgtttaagagagtttgttctattccttttatttcagtgacagcaatagtttgcaaatcattattacatgcagcaaatagtgcataaaataataatgcaagcaatgagccggaaaaataattaattgttttcataactactggattttaaataatgttactatttttcggactttaaggcgttgtgtaaaatatgtttttgttatttgcttggatctctttaaagtatttaaaattgttggtttattctctgacctttaatatagataaaaaaatgacgtaaaaaaaataatcctgtcttatttatatatgtttaatatcttcttgaagttttgtatcgataactctccttcaattgctcttattgtatccatatctattcctcatggcattactataatgtttaaaattgaccatatatatcctgccagcgtaaaactggtgtaacggaagagttttctcgcagtgtgtacataactttagttccactctgtctactataacccggttcctgggcttccgcttcaccagatcgcaggatatatacattctcttgtaacatatcttcgacaataagctatagatcgcttcctgtatttagcaaaatgagtgcaatccggccgggatgatgtttgatgtatgtcatggcctttcagttgtcgtttgatgagattttcaaacgggaacaaacggactgcaagaatgatagaaagtatttctttgatgaatgttggcatcattcccgtatatcctgtcaaagattcggatatactgaattacagaaaaggactgatagcgttttatgaaatggaagactacagcctatatactgattattttctggatagacagattgaacgaattaaggaaatagaataattctttgcttactcgtttcagcttttctaaaattatcccataaatactgtttatgctgttgaggtgtcaaaagtttgctagggcaaaataaggatttgctaatatggaggcaatatttagaattaaaatgcgtaaagattatgcaaccaaggataggaagcgaccaatctcttaatattttttatcaaaccctgacattggaatatcgtagtactgaaccttgtagttgttataataaggcgattgatgaaatttgcaggaggttagagctacatagaaaaagaggaattttgtcgatagttgctctcattacattcattaatggtattattaaagcctgctcttttacctttctgaaatatattttgtatttttgttatatattattggagatatgaaaattaaagataagataactcagagtcttgcaagtataactgttgaattacaggaaataagtcctgatttttatgttataggtgcatctgctatgattttatcaggtatagaggtcggagaaactgctgatatcgatattttgactaccgaaatgaattcatgcaaattgcaacacttgctaaaaacatatatggaaatatctccggaaacaaaagaggatgatttgtttcgttctaattttgccagattcaaacttcctttaatggatattgaggtcatgggggatcttcaaattaagaaaaacgatatttggcagtctgtttgtgtaaaagaatatgaggaaatattcattgggaatttaattatcaagataccaactatagaagagcaaaaaagaatcttatctctttttggcagagagaaagatttaaagaggattttaatactaaatcactatctcttatgaaactataactattatattcagccaaaatggcagagtgcaccgttaagatcggttgattgatgatatctaatttaaaacgaatgcgtatatgaatacagattttgtaaacttaacaaaggaaaacctcagtgatgagcatctatgctgcattattcgcagtaaaaagcctcatgcaggtattgacgcgaagcggcaatggctttccgacagactaaatgaaggtcatgtttttagaaagctaaatgcaaaagctacggtttttattgagtatgcacctcttgagacagcttgggttcccatcattggtgataactattattatctgtattgcttatgggtcttaggaagtcctaaggggaatgggtatggaagagctttgatggaatattgcctgacagacgccaaagaaaaaggcaaatccggtgtttgtatgcttggctcaaagaagcagaagaactggctttctgaccaatcgtttgcgaagaaattcggttttgaagttgttgatgcgactgataatggatatgaactgcttgcactttcttttgacgggacaatgccgaaatttgcgcaaaacgcgaaaaaaatgaaaattgaaagcgaagatctgactatttattatgatatgcaatgcccttatatttatcaaaagattgaaatggtaaaacagtattgtgatacaaataacgttcctgtatctttaattcaagtggatacactccaaaaagcgaaagacctgccttgtgttttcaataactggggcgttttttataaaggaaattttgaaacagtgaacttacttttagatgtcgaacatttaaagagaatacttaaaaaataaataagcagatgcagataatgatggattaatgagatagggttattctctgttttatttatcctgtctctttattttttttgtttctgaaacgataagcggatcaataaccaggcgattaagagacagatcccgatggcagtgaaaactcctttgcgataagaatcctccagctgaatgctgcattttacactgtcgatattggtatcgaccggatgtacccatacactggtcagaggtgtttcgtattcctttccgtttgccttgatggatgccagaggtagtttggtgtttcctggcttcttgaaacgtatgcggtagctgaatccctgctcgtagatatctgtcaatatgccgttttttactgtatgaccggctttgtgtggtgttgctccttcaactgtttctataagcgttccgaagtcgggtggagatacagaatcgaaatcggctgtgctgatgtattttaattcaagctcttgtcctgctttggctccattgcggggagtgtccagttccatatagaaacgttttgtttcttgggcaaaactttttagtcctataggcaaactgatagtgataaacaatataattcttattagttgttggataatgtatgcatgcatattccttatgtgagatataattataaatgatgaaaaaaatattgtttactttcggtttgcctatttctgcttatctatttttagccgatataaaattcagtcgggattagtttgaaatcaacaaattgattttctaccggggcggactttaatagaaaagggacgatgccatcggatggtaaagccttgcgtggcagtgctgtctgtttgtcgaatttataggtggcacaccatgcgttggcgtcaccacatacgcttttgccgatacgaaaacagaattcgctggtatcatcacgtaacgtctgtattagtttgcggcaatcaccggggatttggtcggcatcttgcaatacatttatttcttctgctatttgttttagccattcggtgtcgtgaatgtgtttttgatcaagtgcaaaaacaaatacggcaggataataatcgttattaccgggcatccatagggcggtattagcttgcactaccgcggcataaacaataggagcctcggtatattttcttttccaacgatctttgaatagccagggggcgctgcctgccatagctttgaaaaaagaagtgctcatgtcacgtggtgtctgcaggtaaggggcgagtttgttcaggttagtcggattcttgaagttttcccgctcttctttttcgcgaaggcgctctttttcttcttcctctgcagatttcgcgcgtttggcgcgtagttctgttacatcataaccttgtgattccatttgtgcgatgtcttcttcactcatgttcttttcccaatctttgccgggatttacaaataatgccataatctttgttttttaattggttatttattgcttcttgaaaatagtgtttgttttataagatataaatttatatataaaatttaatattaaaatattgatgcatagtatattaatgatatatataataatattggctatatatttggattcaaaaatacattcttttatttaaaaacaaataataaatggaaggttttttatctgcaaatctattattcttcttgtttgatatcttcttggatttatatttatatctttgcagtcataaatatcggattttagtcgaatatattcatgaatcgtatcaaaggcatactatatgcgtcggtttcctcttccacttttgggctggctccgtttttttcatcactttattgctgatcggtttttcagctttcgaaatactttcttatcgttgggggatagcttcggtagtgttaatcatattcggattattttccggctgtgactttcggttgaaaagaaaggatttggcagttgtgtttgctttgagcctgttgagggtgtaagcatggttgtgtttcgtgaacatcgaatgaaaaggatataaaaaatgccgcatatagcggcatttgaattttgaggagagcctcttgtcggattcgaaccaacgaccccgagattacaaatcacgtgctctggccaactgagctaaagaggcgttttctattttgcgggtgcaaaggtacgaatttattttaaaaatgcaaatacatcatgtactttttttatatttgcagtctcactaatgattgcaagaagatgaaaaagaaaattatgaatgtatgtggtgtggctttattagccgttagtttactggcttgttccggtcagaagaaaggagcagaagctgctgagagcgtttcagacacagtgaaagtggctactgaagcgatgtcggcacaagctgatagtacaggatatattgtcagaataggggagatagcccctgattttacgattacattgacggatggtaaacaagtgactttgtcttctcttcgtgggaaggttgtcatgttgcagtttacagcaagttggtgcggagtatgccgtaaggaaatgccttttatagaaaaagacatttggctgaagcataaggataatgcagactttgcactgattggaatagaccgtgacgaaccgcttgaaaaagtgcttgcctttgcaaagtctaccggagtgacttactcgctgggactggatccgggagctgatatttttgcaaaatatgcattgcgtgatgccggaatcacacggaatgtgctgatagaccgggaaggaaagattgtaaaactgactcgtctgtataatgaagaagagtttgcttcactggttcagcagatcaatgaaatgctgaaataagtgcttattgccggtctctgaaccggatgcgggcacaatagatatagtgtcactatcacactgggatggtgacactatatcgttagtatggttacactattccgatgtgatactgtcactatcctgaatagggctttttctgattaaaataatacgctgtcaggcaaggctcagctttgccagatagtcataatgttttccttctttgattaattctgctttgaatccacattcggaggcgtacaggctaagagtctgaaaatcgatatatagccaatcgaatgtatctccttttacatccttgtattgcatctggaaatctacttccccataataatcgcctgccaggtcgataagcatgctgccgtcttcttcttcgaaaagatagcgcagatcacttgaatccatcagaatacatccgccagggcgtaggatacgtttcatccgttggaagaaggcaggcatattatttagtgttcctatgatgcccgaaccattcatcagcatcagaaccgtatcgaatgtttcggtgaatgtttcgtcaaagagattgatgaggcgggaatcttttacgccgcgttgtttcattacttcgttggaaagcggagagatgtcaatggcgcaaacttcttttcccatttcttgaagtgccaatgcgtggcagccgcttccggctcctacatctaatattcttcccgtagccatttgcagagcagtgcgttcgaggactggcatggactgtatacttcggaataattccttaacggggatttcatcttcttcgaattgagaagagaatactcgcaagcggtcagctctgtgatgattgaaataatcggagattgcagctcccatcgggtccttttctgcggaaagggttattgttgccattttggtgattatgtattgttttatccgccaaagataaacaattccgtagaaaaggcttatctttgcatcagaaatgtgaatgctaacaatataatatatatgagtatagaagatgcaatcatgggtggaatcgtctttaaaggtaagaaagataagccccaggaagaggagaaagtgaagacgaaagcgaagaaagcgacttatattcgtggacaacatggttccggagccgcgaagatgaaagcggatattcggaaaaagagagctaaccgacataaaaaataaatgggaacaattgtttgtatactagcacttttgctggctggccatggacttggtttgatcattaagatgagaatgttttgtcttttaatcaagagagtcgaaacgaaatacattaagaagatagatggaatagtagtggatgttgatacttatgtgaaggatggcaagcttcttatgcgcccgtctgttgaatttacattagaaggagagggtgaaaaatgctgtcggtctatcaatcccaatattattgtggaggatatcacacaattttcatattacccgaaagattttcatataggtgataaagttacggtttggtataatttggataatgatgcaatgtttgtcgagcaaaaaatgcaattgacaagattgtttgttcgtttatttattcccggatgttttttcattatttcaagtattttggggatgtgttatgtcatgaatagctaacaaccttataaaaagaagcggggcaggatgatcatcctgccccgcttctttttagttcgcccagcacgaacatattctaacgggtgtaagtccctaaagcgccctgacaacgggaagtatatagccaacggcaagggtgtccatcgtgaggtggaatctgaaggaagcctgcggcaaatatctggtctgacgtacagaaacttgatattaaggcttaaggatgtggataagtttgctaaacaaaacgaagtcctatagttgtccggaacatccaaagtaaatcaagcagacataagatggaaagaatatgtccataactggggaggtctcacgggcgaggaaaaataaataaatacagtcaagcagtaataacgaaccgtgagaagtcagcagaggtcatagtaaccgacaaggtaaaaaaatcggcagtcggtgaaggactgaacttttaatcaaacaagtaccatttaatactttatgaaagagtcaatgcggaaaatcagtaaaacgaactgcccacaaatggataggacagcatccgacgagtatgtgggagtgcagacttttatggagataaaagatgagcagcttgtggaagtgcaattggaagaaaacaatctgttggaactccttctaagtccatcgaacttgaatgcggcataccgccaagtcgtaaggaatggaggagtgggaggtgtcgataagatggagacgagcgaactgttgccataccttaccctccataaagacgaattgttggaaaagatacgcagggggaagtatcgtccgtcccctgtgcgcaggttagaaattccgaaagacaacggtaaaactcgcccattaggtatcccgacagtggtagaccgctttgttcagcaggcaatcagccaagtgttgataccgctttacgaacctcagttcagtgacaacagcttcggcttccgccctcatcgtagtgctcacgatgcactgcataaggtgcaggaatatgcagaccaaggttatcgctactgtatcggtttggatttggaaaagttctttgaccgtgttaaccacagcaaactgatagaggtcttatcccgaaccgtcaaggacggcagtgtaatatctttgatacacaaataccttaatgcaggagttgtagtatctcacaaatacgcggagactgccgagggcgtcccccaaggtggtccattgagtcctatattgagcaatattcttcttaatgagttggaccaggaattggaacgcagggggcacccgtttgtccgctatgccgatgattgtctgatccttgtccatagtcttcgggcaacggagcgagtccgtgatagtatttccgagtttatagaaaagaagttattcttgaaagtaaacaaagagaagacagaagtcggttccatctgcggcaagaagtatcttggacactccttctactgaagagccgaccgtaaatgtggtcttaatcttcataagaaaagtcaatccaagttcaaacgcaccatcaagcacctgaccagccgtagtagtggtcaaggctacgcttggctgaaactccacctgacgcaatacatccgaggttggctgacatactatcgttatgccgatatgaaagattttataatcaaaacagcgaagtggtacaatcgtcgtcttagaatgtatatatggaagagttggaagcgggtacgtacacgttttgccagcttgcagaagtgtggcatccctcgtcggaaatcttgggaatgggcgaatacccgtaaaggctattggcgcattgcggatagttggatattgcatagagcaatcacaacagataagcttgtaatggcgggttatccgtcaatgataattctttatacccaattgcatcgcagttaagagaaccgccgtatgccgaacggcacgtacggtggtgtgagaggtcggaaaacgaaagtaggaggaaaacttctacttcgttttcctcctactcgattaaggttacttcttttgtggaagtatctctatccagtagtcatccgggtcgttgataaaataaagccccatggctgtattctcaaaacagacacaattcatttctttgtgatattgctgtacggcgttatagtcgccggctacacgaaagcataaatgactttcgttttctcccagttcatagggggaggtatgatcttttagccaggtcagttccagtaggaagccggtttcgttgtccgtcaggtagaccaggatgaaagaaccgtcggaagcttccttccgactatgttcttttaagccaagcgctttttcataaaaagcaatgcttcgctccagattcgttacattgatattaaagtgatcaaatctacttttaatttccatgattgctatcttgttattttttcatcaatagcttcacgatttctccgacatacgtacggggttgtccggcttgcggagtcgtttgtgaaggcagtttcttacattcgataacagccgaaggagtcgtttggttcggagcgtatagtttcagtgtataagtttctgctttttctatcgcttcgtagggctgatcggcagaaagtgtgcaataagctacggctttaccgttttgataacccagtgcgccgcctgcgttggctgtcatattggtcatgttgaattcatctttgccgatagagatcaccagttttccattgcccatcaatgcgtatacatcacccggaatctgcttcagatcgatttctgtatatcctggcatatctgctgaagccttgccgacaggagttgcaggagttaaagtagcagcaggagtagttgtctgatctgcttctgcagtggtaactttaccgccctgaccaatcaccagcggacctgcagcagcaacgatagacggcttctgtgcttcttcttcttttttctttttctcagacttcggacgagtatcgggagcaccgaaggctacagctacatccataaagatgtcatcggcaaagtctaccgtttttctgcgccatttagccaagccgcgtaccagtttggttttagctttgttcagtgcatattcatctgtaatccattcttctgctttgtatttttctgtttcgcggtaggtgaaacggattttttccagttctaccaagcaactgcccagtttgcaggtaacagtgatctgataattgacccaagtgcggtccaatgacagggcgctggagtaaaatgtgatccattcttcacctacaccggcgatggttccttgtgcttcatcgctgaaaacgacgcggctgtccggattattgttttctttcagacgttcgttcatccacttcatgacagtgtcgtagatttgcttctgactcattccgggaatctggaattccttggaaaatactactttaccatctactacaggaacagctcccgcaaggtatctggtatcatctcttttttctttgtgcgattcggctctcattgccattggcaggcatgtgagaagcatggtaagaaacaggattgttaacttattcataattattattgtgtttatttggttatttcaaaactttcgccccgatgggtgatgctgacaaaccggcatcctgcattttcggcaaaatcacggagggcatttccgccttcgtagtcttcactgaagtgcatgggtacaaatatagtagtttttatttgttcgatgaactgttttgcacctttcatataatcttttcccatcctgcggtccactgggaacagcgctaaatcgatcttcggtgctttttcttttaaatatttaacttctgcaaggaagtctccgttggcttttcgtatctccgcttcggtagattcttcactccagtgccagttgttcagatcgcctgcatggaagatgttccagtcttgcagatggatcaggaacgaactgccgacatcggtcgagccgaatgcttcgatgcggatcgtctcgtcttcgtaggtttctccttttttaatataggtagcgtcttcgggctttgcacgatggcttttcagaatatctttggagaaaatgtaccggatgtcgggacgtgcttctttccacgtcagtatttcacggttgaagtggtcggggtgaaagtgagtggccaatacatagagtttacccggtctttgcaggaggtagtcatgtacgattccccggttatgttcagtttccgaagaatctttgtaataatcgatgatgacggtcacaccttctgcttcgatggcaaaaccgctatgataaatataatccagtgtcatgagctgattatttttacagttgcaatattacgtattctagttggagttggcaagaaaaatcagtgaaatcagggagaaagtcgattgatttcccattttccatccgtctttagggtatacaggaagcgatcgtgtaaccggttggggcgtccttgccaaaactccattcgggtaggagtgacggcatatccgccccagttgtcgggccgttccacttcttttcccagccatcgggcagcttctttgacgaaagcgcgtatcagttgcatccggcttgcgataggctggctttgtggagaaatacgtgcaccgatgcggcttttataagggcgcttccggaaatattcgtccgattcctccggagaaactttcgcggcagtaccttcgatgtgtacttgcctttcaagttcatgccagacaaaggaaagtgaaatgtacggattttgtgccagttgccttcctttgcggctttcgtagttggtatagaagataaactttccgtcatgcagtcctttcagcagtacggtacgggtcgagggtctgccttcgggagatacggtacatacaatgatggcggtcggttcttctacgtttgcgtcgatggcttcctgtagccagcggctgaaaagtgaaagcgggtcgcagggaagttcgctttcccttaacccgcttttggtatattcttgccggatatcagctatattcttcattcattcaagattcatgatttctaattccaaatttctacatcggtacttctatcaataagatatgtgagtccttcaatgtttcgagttcgaaacttttcgtatcatagacgcccattccgtcgcgacgtttcagtacttctccgtctactacgatttctccttcgatcaggaaaatgtatacgccgccatgactttggtgcaagtgataaccgagtttctttccggcttccacctttccgatagaaaaccaggtgtcttgtagaagtgaagcgggagtactgccgtcgggcgatacaatcactgccagttcgttcggtcgttccagctctttgatgctgaaatccttgtagacaggatgtgtattccgctctctcggcataatccatatttgcaggaattctaccggctctacagggctggcattcacttcactgtggaaaatacccgttccggcactcatcgtctgaatctctccgacagtgatgatacggctgtttttcttgctgtcaccatgttgcagatgtcctttcaatggaatggagataatctccatatttttatgcggatgggtttggaacccttctccgggggcgactttgtcgtcattcaatacgcggagggcaccgaagtttatacggtcagaatcgaagtattcgtcgaaactgaaggtatggtaactatccagccagtcatattgggaatgtcctcttgtatctgctttatgtattactttcttcataattttctccttttctaattgtttatatacttctgtaacaagggaagtcaggtaaaggttctatctcttcacttcatttagcaaaggcttgtggttgatgaaatccttgatattctgaagtgtggtcatggcgatatttcccattgcttcacgtgtgaaaaaggcttgatgcgaagtgacaatcacattgttaaatgagagcagacgggcaagcacgtcgtcgtcgatgatgcggtcggactggtcttcgtagaaatattcgctttcttcctcgtacacatccaatccggcagaaccgattttcttgttttttaagccttcgatcagggcattggtgtgaatcaattgtccacgaccggtattgatgatcatgactccgtctttcattttgctgatggagtagtcattgatcagatatttggtggcttcggtaagtgggcaatgtagggaaataatgtcggaactatggtacaattcgtccagagaagtataaacgatttgttcttccctggcaaagttgtagtcgggataaaggtcataagccagtatattcattccgaatccctttaagatatgaatcagaattttggcgatttttcctgtaccgatgatacctgccgtcttaccgtgcatgtcgaatcccatcagaccgtgaagggaaaagtttccgtcttttgtacgccacgaagcgcgtggaatctttcggttgagagagagcatgagtgctacggtatattcggcaacggcataaggcgaatatgcaggaacccgtacaacggtgattccggcagtggcggcagcgttcaggtctacattattgaatcctgcacatcggagtgccagcagttttactccgttggctgccatagcatgaatgacttctgcatcggccgtatcgttgacaaagatacagaccgcatctactccttgcgtcaatagcacgttattcttattcagatgtcctttataataacggaattcaaatccgaactctttgtttttatcgttgaaagaagcttcgtcataaggctttgttccgaaaaatgcaattgtataggccataatattttctgtttttattcttattaataaacgtaaaaacagggtggtttgtttatctttacctccgctctgaatgtgaattgtttcattagaaacagtttttattttcaatcaaaatgagctggtaaacgaaaataagtgcacaaacatacgtctcgtgtgcaggaatattgtatctttgcgcccgaattaatttaaaaaagatttagatgagaaaaaatttcttgattggatttgtaatgttaatcgtttcaattccaacttttgccggagattatctaactaatacgaatcagaatgctgctttcttgcgcatgatagcccgcggcgcttccattgatattgatggagtttatagtaatcctgccggactggcattccttccccaaaacggtttacaggtagcactgactattcagagtgcatatcagactcgtgatattgctgctacaagtcctttgtggactatggatggacagacttccgtgcgcaattatgaaggaaaagcttcggctcccgttatcccttctgtacatgctgtatataagaatggtgactgggcattttccggtagtttcgctatcgttggtggtggtggaaaagcttctttcaatacaggtttgcctatgtttgatgcagctgctatcggcttggtaaattctacaagtgatatgttgaaacctaatatgtacaatatcaattcagccatggaaggtcgtcaatatatttatggtttgcagttaggggcaagctataagattaatgaacacttttcagtttttgccggagcccgtatgaattactttacaggtggatataaaggttttctgaatattgccttgaaagaaggagtagcaggacagatcggtgctgctatagtacaacaaattatgggggctaatcctaatttgagtttagaacaggcacagcagattgcacaagaacaatctgcacctatgcttcagaaactgaatgatacgaagcttgaactggattgtgaccagacaggttggggattgacgccgattatcggtgtagacgctaagttcggtaagttgaatttggctgcgaagtatgagttcaaagctaatatgaatattgagaacaatacacataaattggaatttccggatgctgctgctgcctatatggcaccttatcagcatggtgtgaatactccaagtgacctcccttctatgttatctgtagcagcaagttatgaattcttgccttctcttcgtgcttcagtagagtatcatttctttgatgacaagaatgcaggtatggctgataacaagcagaagacattgaaacatggaacacacgaatacctggctggtgtagaatgggatataaacaaaatattcacagtcagtggtggttatcagaaaactgattatggattgagcgatgctttccagacagacacaagtttctcttgtgattcttattcagtcggtttgggcggtcgtattaatcttagtaaggcgttaagtttagatgttgcttatttctggactacctacagcgattataccaaagaaaatccacgtggcttggatggggctatggcttcaatggataaagatgtttatagtcgtacaaacaaagtgtttggtgtaagtgtaaactataagttctaatattaatccgctacgattttatattaaagaagccgtctcgaacattgttcagaggcggcttctcatattatatatacctaatattatatatgtaatagattagaaagaatattgtaccagcatattcagccgattggcatggcgggtagaagagttgaaatcagtgcgccatcctctcagatattcaacacctacttgcatattgctagtcacattccagaaagcatttgctacgaaatactgtccttttcggtatgcttccggattatcactcggatagttgttttcagagtaaagtctggataagctgtatgtaccggatacaaagatattcgggcaaatattatattgcaaccccgcataccagcccagcatcggaagaacctgcatcttgccttcattatccggatcgggaacgatgtccacattcagattacttaagtcgttcagataagaaccaattccttttccataattaaactgtccgaacacttgccacttcttggttacattaaaggtggtagatgcttgcaggccaaatccggtagtcgaaaaagccttgtcgtgcacattacttgaataagtcatgctgcgtacgattgcacccaacttaatatgactgttactattccagttatactgtgcagaagctgcaaaatccggcattcgttgcgtgttgatagatacatcgctattcgttgtaccgtctaccgaaggcatttccatggcaacgccgaatctccagtttttcagtttatcgcacatataactcagttgagtggtacgatagaaagcggaaccgttcggaccggcgaagtcaattgttgcaggcagagccgaaaggtccatgaatgaaccgtagctgtatccgatggtaaatcctaagaactgcgcatacgcattttgaagttcaaacgtcttcccatctccacggaagtttccggcggtatacaccacgaagtcgcccagatgcttggttcgtcctaccaatttcaggaatagggtagaagtggtgatgtccatctgaaattgattcttggcaaaatttccctttccgggctgtccgatcaatgccggatagaaatccacatcgtcaacgatgccgttgaaatcatactctgccgtcgcacgtacgtagccaccgataccaagggcgaattttcctttctgatccgtcagaaggaagcggggagcattcgggtcgtgaaaacgcatctgagagcggtcgttcatgattcggatgatttcatctccggccttgtccctggagacgaacatgatggaattcggttcctcatcctcgatgactactttcttttgcgcatgagcacagacggggaaaattccgatccccagtagcatagctaccattttaaagcttgttttcattatcagttaagttttaggtgaatgcccaatgaacaactaaaaaaagaaatggttgagaggggctaaggaaaaattgccaaacttatcggaagaattgctatttataatcgttctaaaaaagcggatctttgtatcgtactaattagataaataaaatacgagaatggaaaaagtagattttactcaaggaatattggcgatggagtcagacctgcatcgtttcgcatataagttgacttcagaccgtgattctgccaacgacttagttcaggattgtgtattgcaggcattggataatcatgagaaatttacgcatgccaagaatctgaaaggatggatgtttaccatcatgcgtaatatctttgtcaacaactaccggcgcacggtccgtgaaatgaatttgattgatgatacctattccatcaatcagcaaagtttgatagaagatgaagaaggcgaccgtttcgagtttgcttatgacatgaagcagctgtatagagtgatccattccatccccgaagatatgaaagttcctttccagatgtttgtagctggatttaaatacagggaaattgccgaaaaattaggattgccgatggggacggtaaagagccgacttttctttatccgcaagcgtctgaaagaagaattgaaagacttctcctgatgcaactttctaattgagtgatgtgttttaaggtcaaagtgaagccttcctgtcaaaatacgacgaatgacaggaaggcttatttaatttgaaatattcttccgaaatacttggtttataaaataaacctatttatatttgcatcgagtaagagagatgcgcagctccttactttttttaatccatatatagtttataaaataaactaattaaatcgtatcaactaattgattggaggaaagtaaaagatgaaacgcttgttattcattgctttagggattatttgttaccacgttgttacttttgcacaagaagtaaaagtagaagtgcggggtattcgtagtgcaaaaggcgctattatggtcatggcacaacaggattcggaatcgaagccggtatatgcgatggctactgctgttaaagatacagtgactgttgttctaaaagatgttccatgggaaaagtttttaatctctcttttccatgatgagaacggaaactgggaattggacatgaatgaacagggaataccggtagaagggtatgcccgggaaaaatgcaagaaagaggcggatgcttcggctaccgttaaaatgaagatgtattatccggtaaatgactaacagtatgcgatacctgatatttctgatattggccggctttaccggagttactgcttggaggcagacttcgacgactgctcggccgatggctgtgaatgatactctgacagaagattccacttatgtgttgcaggaagtggtggtacggacaagtcctgtgaaacggaaggcagaccgttttatcctgtccgtccctcctgcacagaacaaagacggagtcgaactccttcaacaagcgcccggagtatggttgtccgacgagcggatttccatcaatggttcttccggcacgaaggtgtttgtagataatagggagataaaacttaccggagagatgctgataggctatctccgttctttgaaatcggacgatattgcccgcgttgaagtgcttccaatggcgggagccgataaggatgccgatgctcagggaggtgctatacatattataatgagacgttatatggacaaaggatttcagggaaatctttctatgaatgcttcttttgcctctttcttgcaatcttatcagcctagcggtagcttgaattatcatagtgggaagtgggatacctatggatttgcttccggtactttggttcctcagaataaaggagatttgtatgttacccgtgattatgtagcgggagataaaggtttttccagtctggcccgtatgaagcagccttcgcgttacgggacgattcggatgggaacagtttatacgatggactcttccaatagtctgggagtagagctggagtatgttcgtcgcggatacatctggccgtctcagagttactctactctgtcggtaggaccgttggatatggaaagtcagggtgtgtatcgtcagaaagagacttacaatatgtatacagctactgccaactatatacataaactggataaggacggttcggtgctgaagcttgtcaccgactatatctctaaagatctgcatggcagaaatcagtatcaaatttttcaggagataggtgctctaaataaagataccgtttaccgttcccgctctaatgccacttatcagatcgcaactgccgatctgtcgtggaaacaacagttacataagaaatcgtttttccagataggaatgaaatatacctatacgggaatgaaagatgatgcctgttacgaagggctggagcctgacgaaagttggaagcccaatgttgcttatggatatgaactcgattatcacgagaatatcggtgctttatacggaacttattctctggatatgaaaagaggatctgttcatattggacttcggggagaatatacgcaaacctccaatgaaacagaacgtcggacgagaaaatactgggattggtttccacatatcgatggaaatttctattttgatgaaattcacaagtggatgcttatcggtcagtatggacgctatatagaacgtccgactttttcggctctcaacccgaaccggattcagacttccgaatacagttatctgataggcaacccgatgttgcgtcctacttatattaataaattcagtattacgctggtctataacttccggtatacattgactgttggcggcaatttgcaccatgatctgatccgtcagtttggtaaagaagatgcggagaattcggatatatcatatgtcatcaatgagaatcacaatcgtgagaaccattggttcgtagccatcactgctccctggcagccgctcaattggctgaatctgaatgccagctttatcggagtgaggcaagatatccgcatgtatcgggaggacgattactttgggcacttcctttatttcgccaatgctaatgctacggtccttttaccgtcagactattcgttggaagcacaatataatggagttagccggttgtattccggtaatagcgggatcgatcctcgtcatacattcaacctgcacctccgcaaaaaatggaaagacgggcgttgtgtagctactttgggggtagacaatatcttcaaccgatataattcttatttcagcaatgtaccgagttattcatctcaaaatcgttttgaactggcttcgagcggaagactgatgaaactcacatttacctggaatttcaatcatggaaagaaatcgggtgcggtgactgtagaaaaaaaatcggcaagtgaaagaagccgtatcgaaggaaaatagacaaggatttttggtttattacgtaaacaatattatttttgaaacaaaattgatagaatatggaagacaagagaatttcagagaaagagagtttggaactgattgcccgcatgattcgggagacgcaggacaatacagcccgttatgcagcctacccattattgatatggggatatactactgtggctatatcacttgtggtatggtacttttatttgcagacgggagtgtggcagatcaattttctctggtttgctttgcctgtcattgccggaccgctgactatcttttttaataggaaagacaagaataagggagcaaaaaattacatagaccgggtgactggtcagatatgggctgtgtttggagtagtaggtttttgtctgtcttgcatggcatttgttgtccgtattgatattctgtttgtaatttccttattgatggggatgggggctactcttacggggttggtatgtaagtacaagccgcttagtatagcagggatgactggtatcgccctttctttttccatgctttttattcatggaagcggggtatatctggtgtttgctgccatctttatagtgatgatgattgtccccggacatattatgaataaacagatgaagaagcaatgtttaaagaactgaatcctatcttgcattcacagcttcgcttggctataatgtcgattctgctgacggtggaggaggctgagttcgtctacttgaaagagaagacccagtcgacagcgggaaacctcagtgtgcagttggataagctgagtgaagccggatatatcgaggtggaaaaaagctttgtaggcaaaaggccgcgtactgcctgccggatcactgccggaggcaggaaagcgatggaggaatatgtggagacgctgaaggagtatctttcggggttgtagttcatgccccgaataaagttatcggataactttgccttctcgcttttttcttctacctttgcaccccgaaacaagtaaaaagatgtatgatgccgtgaatagcggtcgtgtattctagaacaccacgtaaaaaacaggagttatgaaagaaaaagtatcagtaccttttatgttgctgggcattctcttcaatgtatgcctcattgcagccaatcttcttgaaacgaaagtaattcaggtcggcagcctgactgtcacagccggattattggtttttcctatttcttatatcattaatgattgtatcgccgaagtttggggattcaagaaagcacgtcttattatctggagtggttttgccatgaacttctttgtggtagggcttggcttgatagctgttgcgatacctgctgctccgttctgggaaggcgaagagcatttcgattttgtattcggtatggctccccgcatcgtagcagccagtttgatggctttccttgtcggttcattcctgaatgcgtatgtgatgagtaagatgaagattgccagtcaggggcggaacttctctgcccgggctattctctcaacgattgtcggcgagactgccgattcgttgattttcttcccgatagctttcggaggcatcattgcctggaaagaactgcttatcatgatgggacttcagattgtcctgaaatcgatgtacgaagtaatcatcctgccggtgactatccgtgtggtgaaagtgattaagaaggtagacggcagtgacgtgtacgatactaatatttcttataacgtactgaaagtcaaagatatttaatgaaacgacttcttccggcctgcttcgagggctgagaatataaagagaattttatgatgaacagagagactgcattggttgtgttcagtggcggacaggattctaccacttgcctcttttgggcgaaacgcaactttaaaaaagtgtacgctttgagtttcctttatggtcagaagcaccagaaagaagtggaactcgccagagaaatagcccgaaaggcagaagtggaatttgatgtgatggatgtgtctttcataggaacattgggacataattcgttgactgacaccacgatggcaatggatcaggaaaagcccgcaggcagcgtccccaatacttttgttccgggacgtaatctgtttttcctgagtattgctgcggtatatgcccgcgaacgtggcatcaaccatttggtgacgggagtttctcagactgactttagcggctatcccgattgccgggacgcgtttattaagtctttgaatgtgacattaaacctggcaatggatgaacaattcgtgattcatacccctctgatgtggattgataaagcagaaacttgggctttggcagatgaattgggagtactggatttgatccgtaacgagactttgacatgctataatggcattcagggggatggttgtgggcattgtcccgcctgtacgctgcgtcgtgaaggactggagaagtatttaaaaaagaagaatcaataatatctctacatagagactaaaaacgtgttttttattgtcacttgtcacttttgaagattaactccttgattacgaatgaataaagggtgataatagatggtgataatagggtgataataaccgataaatgcttttttattgtcacctttattgttgctgacagctgcttgccattctattattggtgttcgtttcatttcgggatgtgcaagggtaaagaagtcattgccggttgtttcaagaagtttcaagcggttgaaactttggttccataggtttgaaaccttagttccataggcttgaaactttagtttctattacttgaaaccatagtttcatacgctcgaaacttttagtttcaaggctttgaaactagagttccatcatagtgaaacacttcattcctttataggaaacgactaaaagcaacggtcgttttgataataggagtaccggatgataataggaataccggatggtgaaagatgaaagatcggtgaaagattgcaataatcaatctttcaccgctgaaccatcgatggataagccgtttcagagaatatggtgacaggtgaaagatgttttgcgtttttttctatatgaagagagtttaaaactatattaaacaatggctgaattaaaagaccaactttccttattaggaagaaaaacggagtataaacaagactatgctcctgaagtattggaggctttcgataataagcatccggaaaatgattactgggtacgtttcaactgtcccgaatttacaagcctgtgccccataaccggacaacctgactttgcagaaatacgtatcagctacatccccgacattaagatggtggaaagcaagagtttgaaactttatctgttcagcttccgtaatcatggtgcatttcatgaagactgtgtgaacatcatcatgaaagatttgataaaactgatgaatcccaaatatatcgaggttacgggtatctttactccacgtggcggtatttcgatttatccgtatgccaattatggccgtccgggaacgaagttcgaacagatggcagagcaccggttgatgaatcgggaataaccagatataaaaataataatacgagcagaatatgactcataatatacctattgaattgcagagatacgtgcaggaaaggattatcccgcaatatgccggctttgataaagcacatcagattgaccatgcagaaaaagtgatcgaagaaagtctgaagctggctcttcattatgaagtcgattctgcaatggtttatacggttgccgcttatcacgacttgggtttatgcgagggacgtgaatttcatcatatcgtttcgggcaaaatattgttggcggatgaaactttgcgtcagtggtttaccgatgaacaaatgctgcagatgaaggaagcgatagaggatcatcgtgcctccaaccgagatgctccgcgaagtatctacgggaaaatagtggctgaggcagaccggattattgatccggaagtaacactgcggcgtaccgtacagtatggtttgtctcattatccggagatggataaagagcagcagtatgaacgcttccggaaacatcttgccgataaatatgcagaaggagggtatctgaagttatggataccccagtctgataatgccggacggttggcggagttgcgtcagttgatggagaatgaggaagaactgcggaccgtatttgataaattatatttagcggaaaactcagcaggataaggagagtttgctgttgaatggaggcatgttattcatgatgatacggccctccattcaatatcgtcattgccctataaatctgttccacgaagatcagccgtatcatctgatgtgaaaaggtcatcttcgacattgaaatcttttcattagctacctgatacaccttctccgaaaatccgtaaggaccaccgatgataaataccaaccgcttattcaccgtattcatcttccgcttcatgtaatcggcaaattcgagtgatcgcatttccttcccgtgctcatcgagcagtacgatcacatcccccggttgcaacgctttcaatatcagttccccttctttctccttctgctgatccatcgaaaggctcttggtattcttcagttcggggatcacttccatatcaaaagtgatgaagcgtttggtacgctgaatatagtcattaatagctgtaatatagtgttgttctacggttcgtccaacgacgagcaaagttgttttcatgcgtctgatattctgattcgagcacaaaaataggcattttttatgttattctgcaattaatgcttacctttgcctatcattagttgaaagtttaagcctttaaacttcaacccaaaagcttggatttatgaagaaacgagtgcttttaggaatggcctctttgcttctttctgtctcattgctgatggcgcaggagataccggcaggagtgattacggcatttaagcggggaagctcgcaggaactgagtaagtatatgggagacagggtaaacctcgttctccaaggcagctcggcaaacgttgacaagaagaaagcgacagcaatgatgcaagagtttttcacggaaaacaaggtcaacgcatttgacgtgaatcatcagggaaaacgggatgaatccagttttgtcataggtacgctgacgactacaaaagggaaattccgtgtgaactgcttcctgaaaaaagtgcagactcaatatttaatacaccaaataagaattgacaagatcaatgaataaggaaaaagaactgatcgacaaactgatcgatcttgcttttgcagaagatataggtgatggtgaccataccaccctttcgtgtattcccgctactgcaatgggaaaatcaaaactactgatcaaagaagccggtgtactggccggaatcgaagttgccaaagaaatcttcaaccgtttcgacccctccatgaaagtggaagtgtttatcaatgacggtactgaagtgaaaccgggcgacgtagctatgatcgtagaaggaaaagtacaatccttgctccagaccgaacgcctgatgctgaacgtcatgcagcgtatgagcggtatcgcaaccatgacccgcaagtatgcaaaggtactggaaggcactcacacccgcgtgctggatacccgcaagacaactccgggaatgcgtatcctcgaaaagatggcagtcaaaatcggtggcggtgtaaaccatcgtatcggtctgttcgacatgattctgctgaaagacaatcacgtggattttgctggaggcatcgacaaagcgatcaaccgtgccaaggattactgcaaggaaaagggcaaggacctgaagattgaaatcgaagtacgcaacttcgacgaattgcagcaagtgcttgacttgggtggcgtagaccgcatcatgttcgacaactttacacccgaaatgactaagaaggcagtcgatatggtagccggcaaatacgaaacagaatcttccggcggtatcactttcgatacccttcgcgactatgccgaatgtggcgtagactttatctctgtaggagctctgactcattcggtgaaaggacttgacatgagtttcaaagcatgctgaatctataagtgatgaactgataataaataaacggtgaacagtgctgttgctatcgtgctgcagctgttcaccgtttattatttacgaatcatcatttctttaacttcttttagcaaaactctttgcagcattcctcaaatacttgcgtctaaaggataaaaacggcgcagacatacgttcgatttaaaaaagacaattggcattggaaaacgagatagaactgataaagggctgtcgggcaggacaggattcagcccgaaaggaactttacaccctctatgccaaacaaatgttggcggtatgctaccgctatacgggcgatatggatgcggcgcacgatgtactgcatgacggtttcatcaagatttttaccaacttctcgttccggggtgaatcctcgctttgtacgtggatcacacgggtgatggtgacacagtcactggactatctgagacgggagaaacgagtcaatcagttggtagtgcatgaagagcagcttcccgacataccggatatttcgtcgtcgggaggaggagcagggatctccgaagaacaattaatggcgtttgtcgccgaattgccggatggttgccgaaccgttttcaacctttatgtgtttgaagagaaatcgcacaaggagatagccgggatgcttcacattaaagaacattcgtctacttcgcagttacacagagccaagtatttgttagcaaaaagaataaaagaatatagaaatcatgaagaaagaaaatgatgaaataaccgatctgtttcgcactcgtctcgctgatgccgggatgactgttcgggatggcttttgggaagagctttcgcaggatatccctgtggcttgccagcatcgccgtcggttgatattcttccgtgtggcagcggcagcatctgtgttgctggtattggctgcatcttcagctactttctggtatctctctccgaaagaagagatggaggaggcgtttaccaaaatcgtggtggcgaacagcggaagaatggatggagatggtgtacgcgctaatcagttgccgacggcaatggaacctgtattgccgaaaccggcacctaaatcatttggattattatcgcagtatccggaagagggagactcggtttccatttccttctccatgtctttctctttctcggcaactaccaccacgggaaatggcaaccgatatggcaaccaaggtcgcaacggttattggcaggcgaataatggtaacacagaaccatccgccgcacaagaagaaaaatatactaccggtacacctgctccggtggaaaacgtaaaaaaacatcgctgggctctgaaagcgcagatggggacggcacttccggcagaggacggtgcctacaagatgccgatctccgcaggagtcactgtagagaggaaactgaatgactatctcggaatagagaccggactgctttattcgaatctgcgctcggaaggacagcacctgcattatctgggcatcccgttgaaagcgaatattaccttgatggatacaaagaaaatcgacctctacgctacggtaggcggagtggcggacaaatgtatagccggtgcgccggacaacagttttaaagaagaacctatccaactggcagttactgccggtatcggaatcacttacaaaattaatgaccgattggcggtttttgccgagccgggtgtttcccatcatttcaagacggattcgaaactggctacggtacgcacgaaacggccgactaattttaatttactttgcggacttcgcatgacgtattaatccttatgaaaatgaaaaaaacacttatgatgctgtggatggctgttagcctgatggtatccctggtgggatgcagcagcgaagaaatggactatgagaatcccgatgtaaccgtttttgtgaaacagctgaaagcgggtacctataatatgaagaatgaaaaaggggtcgtggaagttcctcatttcactgaagaggacattcccgaactattgaaatatgcggaagatctgactattattccttctttcccgtcagtctacaatacgaataacggtaaaatccgtttaggtgaatgtatgctttgggtgatagaatcgatccgtcagggaacagccccgtcgttaggttgcaggatggtactggcgaatgccgaaaattacgaagccatctatttcctgaccgacgacgaagtgctcgacgcggcagcctgctatcgtcgatggtgggaagggcggaaatatccgaagacgacttggacgattgatccgtgctatgacgagccgctttgtggctcaggataccgatggtggtaaaaaaagaaaaatccttcggggcataaaaactaaaaaacatgaggcaacgtttatttgtatcagcagtctttgtactgctgacaggggcgtgctatgcccaatggacgaaggaagattctctgcgattgaagaaatcactgaaggagggcgaagagctgaagctgaataaggaagccgtcagacagattgatttgaatgcaggagcagccaatccgcgtgtgtatgaggagaaacgatggatgcgttttgatgagtcgcttccgcgtgtgatttctccttctgctgtggtcgaatcggatactttgtacgataaacggaggataacaggtgggaaacttcctcttcaaatgcttgaagtgtacaagcctgtttatgctcacttgccattggatacattgaaaattgcgatggagtttaagctccctccccccgaaggaatatctttagggaatggagtaagagtgaacggaggtacgtttagcggtttggatttactgcaggtctttacgagagagttctggcagttcaggaagaaacgaatgcgcacacgtacgatgggggtacttgaggaatatagaaaacagaggtagaaagatgagtgaattgataaaacgtttgataacagctatgacactgtgcctgacagctttgctggtatatgcgcaggaatggacgaaggaggattccttgcgtctgagaaagttgctggacagtgatcaggagctgaatttgaatcaggatgcagtcaggcagattgatttcggcagcgctgtcggcactccccgcatgtcggtggaaaagaagtggatgctgcccgatgagtcgcttcccgaagcattgcctaaaccgaaagtggtattgagtctgatgccctataaggcaaatactccttataattgggaccccgtttttcagaagaaaataagaatggataagaatacctggcgtggagatccgcattacgaaatgcgtcatcaaaggtcgtacagcaactgggcgcgtaatccgatggcgggaggagtccgtaaatcattggaggagatacgggcgagtggggtacgtttccgtcagttgagtgaacgggcgaatggaatgatggttaattcggtagtgatggatagcccgattcctttgtttggaggcagcggcgtgtacatcaatggaggaactatcggagggcttgatctgatggcggttttcaccaaaaacttctgggataaaaaaggaaaagaacgtcgggagcgtacgttggaagtgttgagaacctatggcgattcgacgactgtactgatcaatcgccccattgaacagattgcccgctgaaactgttttattaaatatggacatgtctcatgttccatgttatcagattagcacattgaaaaacgattaatttatgaacagaattacttctcttttcggtattcagtatcctattattcaaggtggcatggtgtggtgtagcggttggcgtctggcttccgcagtaagtaatgcgggaggattgggactgcttggcgcaggctctatgcatccggagactcttcgtgaacatatccggaaatgccgtgcagctacagaccgtctctttggagtcaatattcccttgatgtatcctcagattgaagaaatcatggcgattgttgcagaagagggcgtcaagatcgttttcacttctgccggaaatcctaaagcatggaccggatggctgcacgaacgtggtattatcgtagctcatgtcgtttcctcttcccgtttcgcgatgaagtgtgaagaggcgggagtagatgcggtagtcgctgaaggtttcgaagccggcggacataacgggcgtgaggaaactaccactttctgcttgattcctgcggtacgcaatgcgaccactttgcctttgatcgctgcaggaggtatcggtacgggagaaggtatctttgctgccatggtgctgggagcagaaggggtacaaatcggtactcgctttgcgttgacggatgaaagttcagccagcccggtcttcaaagaatattgtctgggtttgggagaaggagatactaaattattattgaagaaactggctccgacacgtttagtgcggaataatttccgggatgctgtggagagggctgaggatggcggtgcttctgccgaagaattgcggactcttcttgggagaggtcgtgcgaagaaaggtatctttgaaggggatctggaagaaggcgaactggagatagggcaggtgtcggctattgtttcccgtcagcagtcagtagcggaagtcatgaatgaattggtggaggctatgcagcgggcagcggagaagaaatattggtaaaaaaacaagttccgaagtagcgggtttggaaaacctgactacttcagaactttactacttcagaaagttggctgcttaatcaatttataggtttatattttcatattttagatcgaatacatccgctactgctttatataccacttttccttccactacattcaagccgagtgctagtgccgggtcatctttacaagcttttttccatcctttatttgctaaagcaatgacataagggagagtagcattggtcaaagccagcgtagaagtataaggtacagctcccggaatattggctacggcataatgaacgataccgtctatcacataggtaggcgcactgtgggtcgtggggtgtgacgtttcgaaacatcctccctgatctattgctacatccacaagtaccgtaccgggctgcatcattgcaagcatatttcgggtaatcagatgaggcgctttatcccccggaatcagcacggaaccgatgaccagatcaacatccggcaattccttttttatccttaattcggatgcgtacagcgtcttgacatttttcggtaatgtctcgctgagatagcgcaggcgtgacagattaatatctgcaactgtaacatccgcacccattcccgcagccatctgcgctgcattacttccgacaataccgcctccgagaattaatactttggcaggcttcacaccggggactcctcccagaaggataccttttcctccttgcggcttttccaaaaagcgtgctccttcctgaatggacatgcgtccggctacctcactcatagggataagcaggggtaaagaatggtcttccttttctaccgtttcgtatgccagacagatcgacttattgtcaatcatggcaagagtcagttccttatcggaagcaaaatggaagtaagtgaacaataactgtccttttctgatcagatggtattcgggcgcgataggctctttaacctttacaatcatatctgctgtggcatagacatcctctattgtcggaagcacctgtgcaccgacagacagatatgcttcatcaggaaaaccactattgatacctgccgtatgctggatatatacttggtgaccttgcttcacaacttcggcaactccggaaggtgtcatgcctacccgattctcgttgttcttgatttctttgggtactccgatgatcatattgttatatattaaaggtttaacatggaccaatgtacgaaaaatccccttacgttgttattcgcaaggggatgtttaagagcagaatatcgtctgtagtatgatatctgtaaaaggtgatttatattgaatccaatttggaatgaatagaggatttaattcatcaaatctggatttgcattggtagcactttgtggaatacgtaatgtgtaacgaggatcatcttgttcgataattacggtttggccactattcactactttttcgattcttggtctggtagtacggcgtaagtcaaaccatcgatgaccttcaaacgctaactcacgtgcgcgttcatttaatatttcagtgactaattcagcttgattcatcttgttaatttcgctttctttctgtgaatatttagctggagtatatcttttctccattagttgtaatagacggttgcgagaagcaggtaagttgtttagacaggctgctgcttcagctgcattcagatataactcaccgattcggaaactgcacttgtaataagttgtattatttgtttttttgatagggtaattaccactttggctcatagcaccgaagtagtagtctttacgcaaatcaccgtcttggaacatttgtgcaaatttagatgtagcccgtgaagcttccattgtggcgttactataaacattctcatacgctgtaatggactctacggattcatagtgattgggaagttggaaactgacattgttattataatcttccagtgttttcttttgtgccaatacgcgttcggcagcgtcatatgcagtttgccatttacccatgtagagatgtacacgtgagtcgaatgcatctaccgcaagagtggtgaaacgataattgtaaccagcttcccattcttttcggttaataagctttcgggcattttcaatatcggaaagaatagaagtataaacctcatctattgtattacgagttggcatttcttccagattaagtgtcagcttcagcggtatggcttttgttgcaggagctccgtctttggtatatggctgcccgtataaattggccaataagaaatgcatataccccctcatgaagtaagcttctccaactagttggtcaatatcttcctgactaccctctgtgatttcatcttttttgtttatgatagcattggcgtaatagatgttttcataatatgttgcccatccaaattcatagccaccaacagaattatcatcaatccatttctcgatttttccgaagtcagtttggctttgagaggcgtcttcgactataatgtcttctgtacgcatatcacagacacttctgtctgtcagggaattggcatatacttctgtcatgagtgctctatattcttccaaagtatttgggatcactttgcctgtaggctgtatttccaggaaattactgcatgaagtcataaagaaccccattgcgagcatgagaacgatatatatttttttattcttgttcatattcactgttctttaaaagttgaggttaaggttaaatgttaccgatttagcaactggagtggagtaaaggttgcccattgattccggatccaggtaattcttgtagctggaaccaaaaacaaataagttacgtccttccagacctattgtcgctcctttgacgttgaatttatgtagccattcttgtggcagagtgtatgcaagtcgtatgttttgaaggcgtacataactgaggcgtttcacccataaatcaagatttttatagattgtccgctcattttcaaaaagatagtaatctgctgaataataattccggttgacgagagccggaagctttgaactgcgattttcagtagtccatcggtttagtatgtctcggttcgtattatgtcccggatcatattcggtaacgctatatgatggggcagtgcgcacatgtgctccaagattataagcaaagttaaaactcagttcccagttgtgataattcagcgtgttgatgaaaccgccggtataaggtgcgtctgttgtgccggcatactcatacagatttcgttggatgtcggcttttccattatattggtataaacctaatccgcccgattcgtcgtacatttcaaagtattcttcgacagaaacagcttcattgcttcctttcggatagataagtatacgccctgtctctggatctaccttacttcggatggcgaagatagtacctgccggatttccttctagtcctggtgtcagactttgtgtactggccaaatcctttaagaccttattgtagttgtaagcgaagttaaatgtagtataccaggaaaagttgcgagtggtaatattacgtgtttgcagattgacttcaattcctttattttccatactagcccaattgatagtcattccgttgaagccattttctaacggcaggtttttgacaccgataagatctgtacctttacgatagtaatagtctacgctaagattaatcgcagacttaagcacggaaaaatcaacaccaatgttgtatgatgctgtcttttcccagcgtaacttatcgttgggagcactcgaaatggagatactgttttcagtgttattagggagaatggtttgagttccataggtgcctataagatacggagaagtgttcttgtcaatgttaccttgcaatccataggaaaggcgtaatgacaaattatccatccaccctgtagctggtttgaagaaaggttcattggatatacgatataatccactaactgaataaataggtaaaaaacggtatttcttatctactccgaacaggtcggatccatccatacgtacacttgctcccaatgtatagcgattcatgagggtgtaagaaccatttgcgtaaaatgaagcaaaggcattctctgtataagtttttatatgtaatggatattttttagcatcctgatcatcacggatgacgactggttttgttgtaagtgttttaggatcgtagccgtaagcatttgaagttagtgagttataccagttttttcgtatttcagaaccacccataatttgcacttcatgtatatctgcgaaactttgactccattctccttgcagtttccacgtaatctgtgatgttgtggagcctgtaactttgtgcatgccaccttcgggaatgcgatattttgttccattgtcgtatctgctttcatatcgtagatcacgcatggtgaatgtattggctccgatgtattgttccagatccaactgttcccactgtaatccgacctgtgaggttactttccattgatcattgaagcgtaggtcagtgttaaagattgcattgattgctgttgttatagtttctttatttgtattggctctttcttcaaaaatattgaagcctcgtagcgggtcaggaatatctttatttgaaatatcataatcatacgcatagttaccatttgagtcataaggattaaagtatggatttgctgtgcgtgaatagtagataggatttgcatagccatatttatctgcaacgaagtctgtattctttcgtctgtttgcaaaaagtgacatgcctattttcagcatacggtttatttgatacgacgttttgcttgttaaattaaagcgtttcatgctgactcccggtacattaccgtcttcttttgagtagcctagtgaattataataggtaacattttcgcttccgcctgagatgctaaagttgtattcttgtgtaaatgcatctctgaataatatatcattccaatctgtatttatattttttagttgattgatagcggattgagcttcaggtgttaatccatcccagccatttgccctgtatgcatccatcagattatattttttcaggatagatgcaactcctcctttctcataataaacaggatatttatcttcgaagagttcgtatgtatctttaatcagctccaattccaaatcgattttctcctgtgagttaaggagatttaatcgtgaagtatccaaattcggagtataagtcagccttgtattgaaatttacaaccggttttcctgttcttcctcttttggttgtgacaacaattacaccatttgctgctcgtgcaccatagatagcagtggctgctgcatctttcagtatagtaatactttcgatgtcatttggacttattccggcaatagatgattgttttatattaacgatgtcattacttgtatcatcatccaatttgggaatatcagtcccctctaaaggaatgccgtccaatacccacaacggatcctgtgttccgtttagtgaagctgtaccacgaatacgtatacgtgccggtgccccgggagcacctgaagttgtggttacggctacaccggcaatttgtccggccaatgcctggtcgatactttttgctgaacctaccatcgcgtctgttacatcaatttttgtaatagcagctgtcagttttcggcgttctacttcctgataaccggtgacgataacatctcccagtgtatgtgcggaaggttgaagtatgatgcgatagtcattctttcctgcttgcaataataagatttgttcctcaaatccgatatagctgcaatgaatacgggttgttttttcgggaatggaaagagaaaatttaccgtcaatatcagtaactgttcctaaggaaacctctgatgatccgttctttttcagttcatccgtatgaacgtagaccgaagcaccaatcaacggttcgttatcttcaccggagattactaccccggtgatagtacgattagccgcactggccattgccagtgcgttaacaaggaagcatataataatgcaaagatgttttttattcattaattgtaaataaacgtaagtgattgaatcgaattatttaatacctaaagctgtattgatacgtaaaatcatatcttcgtaatgataacgtgttgctgtatcagacgttccgaggcggctctgcaataatttcttaatccgcagtaactctccgcgtttcacggatattgcatccgagatacgattcagttggctgccgtagaagttgagaactcggtgagctcccattttatcttcctgtcggagcgaacgttgttcggccgcatagcagctgcagaaaggagtggcatgatcgagcaagaaatgatcgtctgcaatctttttattgattttcacagcttcgggctctgcggcagctgtgagtaatgcatccagaaagtttttttgcaaagagcgttccatcacattgggaatacctcctcgttcggtaatgccgaaaatattcttgtggagtccgtccattagttccactacggtaaacgctttttttccattgactgattcattttcaatcatacgcatcagacgggtgttgccaagcaagtcccaaaggatgtaggcttgtgcattcttcagtatctgcgtcggggcgttttcttgttgtccaaccggggtgttacggagcaaataggtatattttcctacttccgtatcgaacaaccatttaggataagtcagtacttcatctgtcagaaacttcaaggaagcctgttgcttctctttctcaacgaatgtgtaggtctgtacaccatctcctatgactgtattttcgatatagatgccaccaatgttggccagtacgtgatacagatagttgttccattgattgataattgcgtaatagaggcgtgaggcttcttcgtaagtctgccctttttctccggtagtagtccattgaaggatttgcggaacgatgcgtttcaggttgtcaatgccaagtaaggaagaacgtacgggatcatcgcctaaatcttcattctgtgcacgtggatcaacggcatcacgtacatcctgtgcttcactatatttataaagacggtcggtatgcttactcaggaaatcaaataagatatctttttcttcttccgggctattctttccgtaccagcgatatccatattcgatggcaaagatatcgtaaggaccgatatgcggggaaagaaccttcacgccatctcccggttgggctatgtagttgaagcgggcatagtccataatagaagaagcggtggaatttaatcgggaagtgaacgttgcggaacgtaaggaatcagttgggaacgctgccgatcccatcatgttgtgacgcaatcccaaagagtgccctacctcgtggcaggcaacaaagcggatagcatcacccaatagtgaatccggcaactgcacgctgcgtgcttccgggcaaacagttccggtctgtactgtaatccattcgcttaccatagagagcacattgtgccaccacatgatgtctgcttccagaatctctccggaacgggggtctaacaaagaaggtcccatcgcattcttcttttccgaagctgcgtaggtcagtacggaatagttcacgtcatccatatctatttccatactatcggtaacttcaatggcgatgattgcattcttgaatccggctttttcaaaagcgatctgccagtcttcaatacctctttttatatatttgcgccattgataaggtgtggaattgtcgatatagaatacgattggtttggcaggttctaccacctttcctttcaggtaagcttcccggtcttccggtttgggttccatacgccaacgggtgataaactgctttttatccgttctttgctgtgcatcgctgaaactcaatagcggattggtgaaataacctattttctgattatcaaaacgtcccatcatcggagtttcaggcagcagaaggatagaagaactgacttctaccgttacatatacgcttgttgttccttccgtcactttagtagtcagctcggaagtggcaactacattgttcggaaaggatttcacggataagatacgtgatagatttttaatagccgatgttcccagattgatattggtaaatacattattaatgctggtttccgtaccgtcatagatgtcgttgatcttgatcaccaatgctgtagagtcctgattgacagcctctatcttgaatgcggcaataagcggtgatataaaattgtccttaaccgaacggaaaatagcatccgtctgaggagccagaggtaacgggcgttgttggcggaacatcagtttcccggttgctttgtcccattccatgcaaatcatttgattttcataatttacaccccggtttactccagcatcgttcaattcagccggtactcgttgtaacttgttgacaacaagtaaatcgcgccctagcaatgatgtgggaacctcaaaataataatcgttctttttttgataaacggcaaacatcccttttttaacactgctgccttccactaatttctcgtagtcgctttttactctctcttcttctgaattttttttctttttctttttgaaccaactcagattttctgtagcaggggtagttgcaagtgctgagtacgcttctccactcagcaatatacatgcaatgaccgctgccattacctttacatacattctcattaagtccttttacttttaattattattaaaaacagccgcaaaagtaataatattaataatataatgattacagtttagttgcgaatataataataaaaggaattattaactaggttcatctgctatcattcttcccggatatttcgtaatctagttggaataatgtacatttgcaggagtaaaaaagtgaagaagataatgaaaagatatattgctgctttattattggcctgttgcgtggaggggtatgcacaggaaaaaaagcaggctgcctttgtgccacctttcgactttccccttacattgagtggaaacttcggagaaattcgttccaatcactttcatggcggattagattttaagacgggaggaacaatcggcaaaccggttcgggcacttgctgacgggtatatctcacgtatacgtgtcaccaatggttcggggtatgtgcttgacgtctgttatcacaacggctattccactatcaaccgccatttgagcgcttttctgtctcccattgccgaaagggtaaagaaacttcaatatgaaaatgagaactgggaagtagaaatcatccccgaacccgatgaatatccggtgaaagccggacagcggattgcgttgagcgggaataccggatactcattcggaccacatcttcatttggatgtattcgagacggagacgggagactatatcgaccctatgcctttctttaaaaagaatctgaaagatacacgtgccccgaaagcggatggtatcatgctttttccgcagcttggcaaaggagtggtcagtggaagtcaggaaaataaaacgattctgccgaacagtgaacatccggtggaagcatggggggtaatcggcacaggtgtcaaagcgtatgactacatggacggggtaaataatcattatggagtgtattccgtagtgcttacggtagatggtgccgaagtgttccgtagtaccgtagaccgcttttcgcaggaagaaaaccgaatgataaactcctggacgtatgggcagtacatgaaatcctttattgatcccggaaatacattacggttgttgaaagcctcgaatgataaccgtggcttggtaacgattgacgaagaacgggattatcagtttcaatatacactgaaagatgcttttggcaatacttcccgctatcactttacggtacgtggcaagaaacagccggttgaaccgttgaatcatcgggaaaaatacttctttgcctgggataagacgaattatctgcaggaaccgggcttgagtctgattgttccgaaagggatgctatatgataatgtacctcttcaatatcaggtaaaagcggatagcggagcggttgcatttacctatcagttgaatgataagccggtcccgctacatgcaagctgtgaattgcgaatcggattgcggcgcaaaccagtggcggacactacgaaatattacgtggcgcgagtgacccctaaagggactaaatacagcgtaggagggaagtacgaagatggatttatgaaagcatctattcgtgaactgggcacatatacggttgctttggacactgttcctccggaaattatacctgttaacaagaacttgtggggacgaaacggaaagattgtctatcggctgaaagatgaaggagcaggtatcgcttcctatcggggaacgattgacggtgaatatgcacttttcggtcgtcccaatattgtaaagtcttactgggaatgtgtgcttgacccgaaacatgtgaagaaaggcggcaagcataccgtagaaatgactgtcacggatgcttgtggaaatcagaccgtttcgaaggaaacctttgtttggtaaactattaaaatgtattatatatgaagaaaagaatcattctatctgctgtcctgtttttggcggctttggcgaattctttcgcttgtacgaacctgattgtcggcaaaaatgcttcgactgacggttcgactattgtttcctattcggccgactcgtatggcctgtttggtgagctttatcattatccggctgctacatatcccaaagggacgatgttgaaagtctatgaatgggatacgggtaagtatttgggcgaaatcgaacaggcacgccagacttataatgtgactggcaatatgaatgaatttcaagtgactatcggtgaaaccaccttcggcggacgtccggaactggcagattctaccggaatcatcgactacggaagtctgatttatatcggattgcaacgttcacgttctgctcgcgaggcgatccgtatcatgactgatttggtacagcaatatggctattatagtggaggggaatcgtttacgattgccgatccgaatgaaatctggattatggaaatgatcggtaaggggccgggggtacgtggtgccgtctgggtggctgtacgtgtaccggatgactgtatttcggctcatgccaatcaatcccgtattcatcagtttgacatgaacgacaaagaaaactgtatcacttctccggatgtgatttccttcgctcgcgagaaaggttacttcaatggtgtgaacaaggatttcagctttgctgaggcttatgcgccacttgatttcggtgcccgtcgtttctgcgaagcccgtgtgtggagctatttcaataaatttactgatcatgggaatgactatcttccttatatagaaggaaagacagatactccgatgcctcttttcgtaaagccgaaccgtaaactttccgtacaggatgtgaaagatatgatgcgtgaccactacgaaggaacaccgcttgatatttccaatgatttcggtgccggtccttataaaactccgtatcgcctttctccactgaatttcaaggtaggtgataaggagtattttaacgaacgtccgatttcgactcaacaaagtggcttcgtatttgttgcacaaatgcgtgccaacaagccggaccccataggcggcgttctttggtttggagtggatgatgcgaatatggccgtatttactcctgtttattgctgtacgacgaaagccccgttgtgctatacacgtgtagatggcgcagactacatcacgttctcctggaattccgctttctggattttcaactgggtgtctaatatggtctatccgcgttatgatctgatgatcggtgacgtgcgtgcaactcagaaagagatggaaacgacttttaataatgcgcaggaaggtattgaagaaatggcagctaaattgctggcaaaagataagaatgccgcaatcgctttcctgactaactataccaatatgaccgctcagagtacttttgatacttggaagcaactgggcactttcctgattgtgaagtacaacgacggagtagtgaagcgcgtgaaggacggacagtttgaaaggaattctatcggacagcctgccggtgtcattcgtccgggatatccgaaggagtttctggaggaatatgtgaagcagacaggagagagatatttggtgaaatagttgtcaattattcattaaataactaggatttataaacttattcttttacatttgtgtgctcaagacttggcatatattcaaggattgacagagaatagagaaataatcattaaccaataaacaataatcgaaatggaaaatcaggaacttatcaagcaggtcactgagaaagccgaaaaatggctgaccccggcttatgatgccgaaactcaggctgaagtgaaacgtatgttggagaacgaagataaaaccgaattgatcgaagcattctacaaagatcttgaatttggaacgggtggtttgcgtggtatcatgggagtaggtagcaaccgcatgaatatctatacggtaggtgctgctacacaggggctttccaactatctgaagaagaacttcaaagatctgcctcagatttctgtagtggttgggcacgactgtcgtaacaacagccgtctgttcgctgaaacttcagccaacattttctcagctaatggcatcaaagtatatctgtttgatgatatgcgtccgactccggaaatgtctttcgcaatccgtcacctcggttgccagagcggtattatcttgactgcttctcacaatccgaaagaatacaacggttacaaagcatactgggatgatggtgcgcaagtactggctccgcacgatgctggtatcattgatgaagtgaataatatcgcttccgctgctgatatcaagttccaggggaacccggatctgattcagatcatcggtgaagatattgacaagatttaccttgatatggtgaagacagtttctattgatccggaagctatcgcccgtcataaggatatgaagatcgtttatactccgattcacggtacaggtatgatgctgattccgcgcgctttgaagatgtggggattcgaaaatgtatttactgttcccgaacagatgatcaaagacggtaacttcccgacagtaatatctccgaatccggaaaatgccgaggcgctttctatggctgtcaatctggctaaagaaattgatgccgaccttgtgatggcttccgatccggatgctgaccgtgtaggtatcgcctgcaaggacgacaagggtgaatgggtactgatcaacggtaaccagacttgtatgatgtatctttactatattctgactcagtacaaacaattgggtaagatcaagggtaatgaattctgtgtgaagactatcgttactaccgaacttatcaagaagattgctgataagaataacatcgaaatgctcgactgctacaccggatttaaatggatcgcacgtgaaatccgtctgcgtgaaggcaaaaagaaatatatcggtggtggtgaagagagttacggcttccttgccgaagacttcgtacgtgataaagatgccgtatcagcttgctgtctgattgcagaagtagctgcatgggcaaaagataacggtaagtcattgtaccagttgttgctggatatctacgtagaatatggattctccaaagaattcacagtgaacgtagtgaaaccgggcaagagcggtgctgaagaaatcaaagctatgatggaaaacttccgtgctaatcctccgaaagaactgggtggctccaaggtgattttgagcaaagactataagacgctgaaacagacagatgcagaaggcaaggtgactgaccttgatatgccggaaacatctaatgtgctccaatacttcactgaagatggaagcaaagtttcagttcgcccgtcgggaacagaaccgaagatcaaattctatatggaagtacaaggagaaatgggttgtcgcaactgtttcgcttctgctgatgctgctgcaatggaaaagattgaagcagtaaagaagtcattaggtatttgattccgttcttcttctgatatttcagaatagagaaacaataaataacgcctccatagtctcgaagattatggaggcgtttcttttatgtaaccgccttttcatcggtctttcatttcctttgcattctttaagttcccttgctaatccttcttatggaaatcttgttctatctaaatcatctcaatttaaacatgcaggctacggggatacacggttttgttgatgctttagagtgatacgtaacgtttcattttcataagttgttcgtttgtagtttgtgtgtacttcgtggcctgctttcttcattatttcttagctcccaaccaagtccatttgtgccagatggtttccaatggtccttgtttgtgcttcgacagccaccatttacagaactgtacctgtaataggaaaagaatgattccgataatcagactgagcgtatatccgcaatagggagccagataaaatccgaatgggaagtagatgatagctcccataatagattgtgtgatgtagttagtcagactcatttttccgtaaaagcgcaggttggaaacggttttctggaacttagccttctgataaagtaagatgaaggaggcaatcagtacaatggtgaatgcgaatttctgccacatatcgaaagctgtccctacggtctgttgaatcaggctgctgtcactttgcatgatctgctctttcaaagagtaaagcggagcgaaactgatagctgcaatgatcagtgctttggtccagaatttcagatgagactctgaagtgacgaacagttctttgcgtccgatgtacagaccgaacaggaaaagtccggcagtttgtaagaaacgtccggcaccaatggcccagaacaagctcgctttctgtcctaatgtgacattgccaatgaggaattcccaaaaagttccgtttttggtgtaatctgccacttcgctatacatggctccgacattcagatcgggcagggtataggcaggattgaacagactcattatataatggaaccattcaataggctgtaatgagaataagatagcggtgattaaaatagccttatcgctccatttgcgtacaataaatagtatgataccgacaacaacaaacagaagcaaaacatctccagccggaaagaaagccgcgttaagagtggcaaaaccggcaagtaaaaccagtctccataaaaaacggtagccgaaatcttttcctttcaactgctgattatgcgattggatatagaaagtaaatccgaaaagcaaggcgaatatggcataagattttccggcaaacaatgagaatattgcattaaacactccggcatctaaaacgctaagccattcgggagaactctccggataaacagggaaaatgaaatgttccagattgtgtaccaagaggatggccataactgcaaatcctctgagggcatctactacttcaattcgtggtgtcttttttaataattccatggggctgatttatgattgttttttagttagtattcgttttacccatttattggcgggcttttcgaaataatagtaagaaagtaaactaagtgtaatggtgataccgaaaataaggggaacactgatcatccacgacacctgccattgatagagcgctgccattttcgtatatgtgagtataataaacaaatgtatcaggtagaaactatagctgatttctccacctattatcagaaaccgattggataatagccgggatatacctcccttctgaaaggcaaagatcagtatcatcagagaaacaggtaaccagtaatagcaagaataacggtatactttaggtatatctgcggcacaaagataaaaaagaagaaataaagcgacggatgctacttctgacaatgttcccgtggaataagaaatctttttattatgtaatgcctgatagatctgataaagtaatactcccacaaaaaagtccggcaggcgggtgatgggattgacataccaatatgccttgatttgttcgtcggcagtcagatacatacctgccagcatgaccggaagacagattgagagtataaccaatagttttcgcctgctgtttaagaaaggaatcacgaaaggaaagcagaaataaaataactgttcgcaccccaaactccatgaaggactgttgaaagagaagaaataatcggcagaggggaagaagggttgtaacagaaaggtagaggcgacaaagtgtttgatccagtccgtcgtatcgctatattgaacatatcctcctatacatgcggctattaatagtgtaagtagatgcaggggataaatgcgggcaatgcgtgctacccagaacgtgcgtttagtagtcgtttttgtcagcagtttttcctgataattgtaggcaataataaacccgctgaggacaaaaaagaaactgactccaacaaatccttctttaaagaagtgggcatcgaaacttgtatccagaacatagcaatgtgctccgaataccatcaaggcaaagaatattcgtaaagatgttaatgtgttgatcacgacgtttatctgtttcttttttgtattcggctgtaaaagtacagtttttctgtgatataaaaattcacatagattaaaaagaactcaggattcggagcgcaggcggcttaaatgttgtggagtcatcccaagaaaggaagctatatatcccagttgggcacggtgaattacatccggctgttcgcgtagaagttgttcgtagcgttctttggccggtagatatagtcggtttatgtggtgtatgtccatgtagagcagacattcctgatggataacgcgtccccagttggcaatctcgatatttgtttcataaatctgatttaattcatcaatgcgtatggcatatagtttacaatcttccagtaattctacatattcgtatcccggttggttgtggtataagtctttcatcgcaaaagtgatatcgccttcgcgtgagaaccagatcgtgatttcttcaccgtcacgcaggcaataggagcggcaaaatcctttctcaataaagtagacgtgacgatctgatactccgccgtgtatcagtaagtgtttctttggcaattccagctttttcatgtggctgaaaagcatttccagtgagctgtcagataccggataatatcggcggattcctttgatgatgttctccatgtctgtttatttatgggagcattccagccaccagtcgatcattttccgtgccaggctcaactttcgtggaagttccggcaaattatctcttgtatagaaatcaccggagcttaattcctcttcttgcaatttgatttctcctccggcataatcggcaatgaatcctaccattaatccgctggggtagggccagggctggttgccgaaataagtgatattcttcacgtccagtccggtttcctctttcacttcgcgggctacacattcttccagtgtttcgcctgtttcgaggaatccggctacaaggctgttgaatctgcctttaaagttgcgggcatgaacgagaagtatggagtcgcctttgcgcactaaaacaaggatggctgtcgagatagccggatacacttcacggccacagttcggacagcgtttcatgatagattccttttgttccatcggagtgccgcaagccgagcagaacagactgtttctgtcccaatgcagtatttcgtgggctttgcctgctgcctgataatgtcccagcggaaggtattcgtaagaagcgcgaagccctatcattgcatattgctctgtctcttcaataggttgggatacggaataagctttgcagtttcttccttccagtgtggtgatattgtgtactgtagtcttgtctttgatcaggataggaggaatttctccgcagggaatggcaaatgtaccgttcccctccttttcaagtagtagttcgtctttgtaaaagacaaaccacagggattcagctgtttgattcattttatatttttctattttcttcgcgctgcgaagttataaaaactgtatcgatatatgtagggtttaccggataaaatatgaatagattaacttaaaaatatactttgttccactccaatctcctgaatgaaataattatcgtgtgagatggctatcacagtacctgcatagtttttgatggtagcagtaataatttcgatgctttgtatatccaggttattggtcggttcgtccagtataaacatatcgggcatattattactgatcatcaggcaacaaaaggcaagtctcattttctctccgccgcttagcttccggcaagatttatcccattcggaagccggaaataaatatcggttcagaataatctttatttcgtgctccggcaggttgcggccattgaaggcataggcttgttccaaaatactgtttcgatcattgatgatcgaatattcctgattcagatatacataggtgaaatttgcctgtatgagcgtgcctttcagtggttgaagttgtccggttatgattttcagcagagttgtttttccgctgccgttgcctccttctatacgaaggcggtccccgcttttcagctggaagctgagaggagcttgccaaagttgtggctgatcgggatgataaccgaagttaatctcctctgccgtaaccagtattttaccggtatgaagtccggaattgttaaagtcagtctttagtgcagctgtcggcgagagtgaacttcggagttggttacgctcgtcagttaacttctcggctttctcctgatgggcaccggttagtttggcagtgctcttttccgatttgctttgcaaaccgttcagtacaatacgcggaacaccttttttcaggtttcttttttcaccacgtacattctgtttatccctccgttcagctgtttcgcgggctaccttgcgggcggtgcggagcgctttttctttttcttcgatgcgttgttgcagggcttcttgcatcagtgttttttgttctttgtaaaattcatagtttccaccgtaatagctgatctgatgcttttccagttcacatatttcgggaagaagattcagcagtgtacggtcatggcttactaccaacagcgtggaacgccatttttccacccagtcatacagacgttgtctgcctgacgaatcgagatgattggtcggttcatccatcagtatgacggatggattatgaatgtccatacctgcgaggaatacgcgtgtcttttctcctccgctgagcagattcattgggtaggatagtgggaattggcccaatccccacgaatcgagggcggcgacggaacgttcttctatattccagtcgtcgttcaatatgctgaaattttcgattgaggcatctcccgcaaggatagcatgtagtgctttctgcttatggtctatctgtaaggcttgcgcgatggtcaacgaatcatattgcccgaaatgttggggaatataatagaggtcgtccggtcggacgatgacgccggaagagggtgctaattgtccggcaataatttgcagcagggtagatttgccacagccgttgttgccgactaatcctaacttctgccctttactgatggcaaagttaaggtcactgaataatacttctttatccggatggatatagctgatttgttgaatactaataggcatgatggtctattgggtttgaggttgaaaactgggtgaggataatcacgggacaagggaacgacaaacacaatactggctaaacaacacgaatttcgtgatgcttaacgataaagaaaaagcatggatgaaaagtgatgtttactagaagtgttgtcttacttagaaattctcattgtggtaagtatatagtttaacttgggtgcaaagatagtactttcttttatatatcaccgttttttagctaaaaaagatgtatttcagaggttctgttcggttgaatcagaggctttgtttagtccattcagaggctctgtttactcgattcagaggctctgttttgagtctgttttaaatgatagatatgagtatttgattcatttgagtgtttaatgccggtctttcttgtttttcttgcataaatcattttccccagtcgtacatctaagtattactcaaatgtgcgactggggataactgttattgccataaaaataggctcagattagtggaaagacataataaggttattaacgtattcctgcacgttttagtccctccctttacattatacgtcaaataattgattcaacccctcgctcatactcggatgtgtgaagatgaagtcacgcaggaacgtagaagtctgtcccgtcttcatagccattgcaaccatattgatcagttccggagcatcggtacagaacatggtacatcccataatcttaccgctatggctattgataatagcctttagcatcccatcagtctgttgcaaggtacgcgaacggacaacggaggttgccggcagtcgggagactttaaaagaatacccttttctcagtgcctcctcttccgtaattccgatatgtgccaatggcggatcgataaatacagcataaggcagaggatccctgtcgttgatgtcacgtttcttgtccccgaaaagctgatcccggataatacgaaaatcatccagtgagacataggtaaattgcgctcctccttttacatctcccattgcccatatatgaggggcattggtatgtaattggtcattgactacaattgccccgtgcgcatcgacttctacaccggctgcttgcaggttcagtccttcaatcattggtttgcggcctgtggcaataaggatcgcatcaccgtctacaaagtaaggagtgccgtccgaagtatccgaataagtcagagttaccccgtcgtgcgtatcatggatcgattgagtacggacattcagacgaatctcgactcctttcttctccatcacttcccgaacgcttttcgcaatatccgaatcattgcggggcatgaatctgtttcctgcttcgagaagagtcactttacttccgaagccggcgtacatcgaagcaaactccagtccgatatagcctccgcctacaataatcaggtgctttggcagaatatccaattccagaagagtggtactggtgtacacatttcgactttgctgaataccctctatactgggaataataggtgtagagccggtattgataaaaatctcttttccctgcagttcgatttcttcttcgggaagagcaaccttcaccgtattggctgaaacgagagaccctttacctgtgtaaatagtcacattagggcgtttgcttaatttctcgtagttattttctcttaaaaaagaggtaagtttgttttttctggcaatcgcctgcctatacatgttactctgcttatcaaaatcattgtgataaagcagggtggaaatctctgattcgtgaatcaaagttttggttggtatacaggctacgttagggcaagcccctccgtacatttcatcggactgttcgactacagcgacctgccatcctctgttggaaagttcggcagccagtgtttttcctgccttgccgaaccctataataattgcatcatattgtttcataacttcctttcattaacgatttatactcagctattataacacatgaagagtatatttgttttgcgtcatatccgggaagcaaaggtgtccgtagcggacagaatcagctttttttcagtgttttgagtacgcgttgtgacgaatctgaaagaagcactacggctcctgcgagaataacgatatctttgataaccagtcttccggcaccggacaataacgggaagccaaattcatctccacccagattcggaacccagacttcgggcgtggtgacaaggaaggatagtgtacccaacgtcataatgatggcgagcgtatcacctaccagcgctactttcgggaagaaaatgcccaggaataccagaataccgatactcatgatgagcgctcctaatccataggagaaagtataagtgcgattggcttcgtgccaggcgcggttttccggaacgaaggctccttccggatttttgtggtctttgtattcaggagcatcttttgcatagaagaagctcatgaagggactgttggctacaaaaggaacaattccgtcggcttcgtagtggaaatatttcagtccaccgatccatacgaatacgactaagatagctacacggataaacttaattccgaaattcttcaagctggaagtgaaggtaagcaaagcaataaatttctctttcattttgcggtctttttatgggtttaactttataccgcaaaggtcgtgctttctgcatacccccgaaatggcaatacttccgcttcacttatcaattcttcccaacttccgtatttctgaactgtacggcactctgtcctgtcatgtttttgaaaaaacggctgaaagaagcctggtcttcaaatcccaggatatcggcaatttctttcgcactcttattgctgtagagcaggaggcgtttggcttccgcttccacccgttcgtggatgactcttagcggagaaggcagcttacatgttgagaaaatgttcgaaagtgtcttcggtgacttgtgaagcatatcggcatagtcctgtacctgttttttggtccggtaatgctcgtctaccagattgtaatactggcggacaatctcgaagccggattctttttcgcgcgtgatatccagtcgttgacgggcgattcgggtgcattggatgatgaaacgcttcagcaggatacgcagcatttcttcctgcaggctgtcggaaacggtgaactcgttttccatggcttcggtaatctggtccagttgccggcgctctgcttcgttcagtgtgaagcggacaaggtgggacgaaccgttgaaaaggaagccgctgcacgacacttcgtggtcgtttccatagatacaatagaagttgctgttgaacagcaaagtcatatattcaccatctatggacttaaattcaagatgctgcagatgagtcagtgagataacgtcgtcttttgaaagtaccatctcttgatggtcgatttctactgtaatgcttccttggcggacccatataaacttatagagtcctttttctttttgcaaagctttctctgtcagataagaatctgtgagagcgagtgttccttttagtttggtgtgatactgttgtaacataatttattcctccatggctgatgcgtcaaatgacagcggtagtaaatcgccgatactttttacttcgtagatacattctctgccgtatagcagaatacggataggctggccgtaacgtttttccgtttccagaatcacttggcggcaggcgccacaaggaggaataggagtttctataaagtccttttcggttcttgctgcgatagcgagggtatttaccggttggtcgggatactgcgagttggcatagaacagggtagtacgttccgcacaaagtcccgacgggtaagctgcgttctcctgattggttcccgtcacaatggttccgttgttcagcagtgcggcggcgcctactgagaaatgcgaataaggagcgtagctgcgggcggttgcttccatggctgttttcattaatgaccggtcagcttcgttcagttcatcgtattgatatactttgattatagcggtaattgtgaggtccttcatatcggtaaataggttagttctacattattaatgttacaaagttagaaaagagattgataatcccaattatttttcagatttttgtgtccgataatccacatataagttaaaatggagaacaaattgtatagactagtctttctaactgccattatcttctttgccgtaggagtacaggcacaaagacggaatgcacgttatgtagaatatataaataagtatagtgacttggctgtggagcagatgaagcttcacaaaattcccgcaagcatcactctggcacagggattgcttgaaagcggagccggaaacagccagttggcacgcaagagtaataatcatttcggtattaagtgtggcggcagttggcgcggacgttcggtacgtcatgatgacgatgcccgcaatgaatgtttccgtgcctacaagcatccccgcgaatcgtacgaagaccattccgactttctgaaaaggggtgcccgttatgccttccttttcaaactcgatatcaccgattacaaaggatgggcacgcggattaaaaaaggcaggatacgccacagacccttcctatgccaatcgactgattacgattatcgaagattacgacctgtataaatatgacagcaaaggtgtctactcggaacgcaagttgcgaaagaacccgtggctgctgagtccgcatccggtgtatatcgccaatgatatcgcttatatcgtggcccgcagcggggatactttcaaggatttgggtaaggaatttgatatcagctggaagaagttggtgaagtataacgacttgcagcgtgattatactttagtagccggagatatcatctatctgaagagcaaaaagaagaaagcatccaagcctcatactgtatatattgtgaaagatggtgattctatgcatgccatctcgcagaaatatggtatccgtctcaagaatctgtacaagatgaatcgtaaggacggagaatatattccggaggtaggagatcgtttgcgtctgcgttagaaaactttatgccatactcatgtgttattatgtatgataaaacatgattaatatatgagtctaaatattgcaaaggacagtaagaaacgggtcgtcattgtaggcggtggtttcggtggcttgaagttggctaataagctgaaaaaatcaggctttcaagttgtgttgatagataagaacaactatcatcagttccctccgttaatttatcaggtggcctcggcaggtatggaaccgacttccatttccttccctttccgcaagatattccagcatcggaaagatttttatttccgtatggcggaagtacgtgctgttttccccgaaaagaacatgatacagacttccatagggaaggcggaatacgactatctggttcttgctgcgggtacgacgaccaatttctttggtaataaacatatcgaagaggaggccatgccaatgaaaaacgtgtccgaagctatggggctcagaaatgcgcttctcgccaacttggagcgtgctgtgacctgctccaacaaacaggaacagcaggagttgctgaatatcgttgtcgtaggtggtggtgccacgggagtggaagtggcgggagtactttcggaaatgaagaaatttgtattgccgaatgattatcccgatatgcccagcagtctgatgcatatttatctgatagaagcgggtccgcggctacttgccggaatgtccgaagactcatcgagtcatgcagaacagtttctccgtgaaatgggagtcaacattcttttaaataagcgtgtcacggattaccgtgaccataaggtgacacttgaagacggcagtgagattgctacccgtacttttatttgggtaagtggagtgaccggagtttcttttgggaatatgaatacgtccgtaatcggtcgtggaggccgtatcaaagtagatgccttcaatcgggtagaaggaacgaataatgtatttgccattggtgacttatgtattctttccggtgacgaagattatccgaacggacatcctcaactggcacaagttgccatccaacaaggggaattgctggcaaagaatctgatccgcctggaaaaaggaaaagagatgaagccttttcattatcgtaacttggggtcgatggcgactgtcgggcgtaatcgtgccgtggcggaattcagcaaggtgaagatgcagggatggtttgcttgggtaatgtggctggtagtgcatctgcgctctattctgggagtacgcaataaagtagtggtgttgttgaactgggtatggaattacttcacctatgatcagtccatgagaatgattgtctatgcccgcaaggcgaaagagatccgtgaccgggaagcaattgaggcaactacccattgggggaaagacctcatacaggagccacaaccggccaaacaagaaccgcaaccaaactcaaaagaaatagtatagcaccgttttgcgatggtgtcactatccggtcggtatagtgacactataacaagaagatagtgacactataataacagtatagtgacaccatgtttttttgaacggtaaattcgtacaaggtgtccgatatcggacaccttctcttttttattattctctgttaatcagttgattatgcttttggcatagatttggtataataaaaggtaaaacaactgaaagtgaaattgtaaatacttagatatggacagagaaatacccaaagaagtgcgtaacaaagaacgcaataaaaagatcatccgttattcatcgataggagtggccggtatagttgttatcggcatacttatatctgtcatgcggacaggagtggaaaaaaaggatctggtactttctacagttgataagggaatgattgaagttagtgtcagcgcctccggtaaggtagtccctgcatttgaagaaatcatcaattctcccattaacagtcgtatcgttgaggtatacagaaaaggaggggatagtgtggaaatcggcactccgattctgaaactcgaccttcagagcacggaaacggaatataaaaaactgcttgacgaagaacagatgcgccgctataagctggatcagctttgcgtcaataatcagacgaaactttccgatatggcgatgcagattaaggtctctgccatgaaattgagccgcatgaaagtggaacttcggaacgaacactatctggacagtctgggagcgggaacaacagataaagtgcgtcaggcagaattgagctataacgtagcacaactggaatacgaacagctccaacaacaatataagaacgaaaaagaagtagcggctgccgaactgaaagtgcaggaactggatttcaatatcttccgtaaaagtcttgccgaaatgaagcgtacactggacgatgcccagattcggtctccgcgtaaagcgattcttacctacattaataatcagatcggtgctcagatttcgcaaggcggacaggtggccatcatctcagacttaagccattttaaagtagaaggtgaaatagccgatacctacggtgaccgggtagctgccggagggaaagcggttgtgaagataggcaatgacaaactggaaggaacggtcagcagtgtgacacccctgtctaaaaacggagtcatttcttttacagtgcagttgaaagacgataataaccaccgtttacgttcgggactgaaaacggacgtttatgtgatgaatgccgtaaaggaagatgtgatgcggatggcaaacgcttctttctatgtgggacgtggtgagtatgatctttttgtccggacatctgatgacgaactggtgaaacgtaaagtacagctgggcgattccaactttgaatatgtggaagtggtgagtggcttacaaccgggagatgtagtggtagtcagtgatatgagctcttataagaacaagaataagctgaaaatgagataaaaacgatctaaattaaatacttatagttatgataacattgacttctctctctaagatttaccgtacggacgagattgaaacggtagcactggaaaacgtgaatctgaccgtagaccgcggagaatttctaagcattatggggccgtccggatgtggcaaatctactttgttgaatattatgggactgcttgatgcacccacaacaggaactgttgaaattaacggtacgcacactgagggaatgaaagataagcaactggcggctttccgtaacaaaacactgggctttgtattccagtctttccatctgattaattcactcaatgtgatggataacgttgagttaccgttactctatcgtcgtatcggcagcggtgaacgcaagcgtttggcgaaggaggtactggaaaaagtcggattgagtcatcgtatgaatcactttccgacacagctttccggtggtcagtgtcagcgtgtggccatagcgcgtgcaattatcggtcatccggagataattctggccgatgaacctaccggtaatctggattctaagatgggtgccgaagtcatggaacttctccatcggctgaataaggaagacggccgaactatcgttatggtgacgcataatgaagaacaggcgaaacagacttcaagaactatccgtttcttcgatggccgtcaggtacagtaatccccttttaaactctaaaaaagctaatcatgacaaagaatatttttataactgctgttgcggtattattaagtgtagccctttgcccgctttgggcacaaaatgtgagtgaagattgtaaagtaggcgaattttccgctatcaatctgcggtcggtaggtaacattattttcactcagtccgatacttattcctgtcggatggaaggtccttttgaatatgtcgataaaacaaaagtaacggtaaaaggagaaacattggttatcgaatataagcagaagaatgtaaaaaacgttaagaacctgacgttctatatcacagcccctgatttgaagagtgtaaagatcgatggtgtcggcaacttcaatgctaaagaaaccctgaaactgaaaaatgtaactttcaaactcgatggagtgggaaactgtgaggtgaaaaagctccattgtgatgagttggaattaatggtagacggggtagggaatatgaatgtcaatgtaaactgcaatactgtgaaagccaaagtggatggagtcggaaatatcaaattgtccggcaaggcagacagagcttctctgaagcgtgacggagtaggcagaatcaatcataaaggcctgaaatgcccggatgtgagcacgaaaggctggggattctgataagtatgaaaatgaatgagaagataatgagattacaatgataaaactctatttcaaacaagcatttcacctgttgaaggagaataagttactttcttctatctctatcataggtacggcattggctattgctatgattatggtgattgtgatcacattgcgtgctactattgcaccctttgctccggaaagctatcgtgaccgtatgttgattttcaggtatgcgggatttcagtataaaacaaacgagaactggcagagtaacggacctgtttcttataagacagcgaaagcctgttttaaagaaatggctgcccctgaagcagttactataaccagcagtttctcggaaacgatgctggctgccaagccagcgggagagaaggttagttgcagtgtattgcaggtggatgatgatttctggaaagtatttaagttcgatttcctttcgggatatccgtttgataaggctacttttgatgccggtgcaaccaaagcagtaatatctgaggatatagcccggcaattgttcggaacatcggatgtagtcggaaaaacattccttttaaatcactccgcttatatgatttgtggagttgtgcgtcccgtatccaaactggcacggtatgcttatgcccagatttggattcctttaagttcaacagatgcgtttaccgccagttggggtgaatatggaattatgggaatggtgagtgtctacattttggctaaatctcaggatgactttccggcaatccgtatggaagctgaacgtctcagggacagatatatggaaggttatccggattatgaattgctctatcgtgaccagccggatacttattttgtggcggcgcaacgatattcagccaataatcctccggctgtgaagcaggctgtccgtcagtatataataacgttaatcattctgttgatcgtacctgctgtcaacctttccggactgacattgtcgcgtatgcgcaaacgcctttctgaaattggtgttcgaaaagctttcggtgcgcccagacgcgaactgatgatacaggtactttctgagaatatgctttattcactgttgggtggagtgctcggattaattctgagttatggcgcaactttctttttgggaagtatgctgttttccattgactttatgggtaatggtgtgacggatttgcggaccatgtgtatggatctgctgtttgacccggttgtgttcttgctcgcattttttgcctgctttgcacttaatttattgagtgctgctattccggcatggagagtgacacggacaaatattgtggatgccatcaatgagagataaccgaaacattcaacaaactaatttttaagaagatgcaactgttaaaacaaatatggaacgaacgtcgctcgaacgggtggctgtgggcagaattgctgattgttttcgtggtgttgtggtatattgtcgattggacgtatgcaacagcgcgtacttattacgaaccgctgggatatgacatcaccaatacttactatctggaactcagtctgaaaaacaataagagtgattcttatattccgagagggcagaaggaaacgacgacgggacaggacattgttgaactgactaaccgactccgtcgcttgccggaagtagaggctgtctcgatatcagtgaatgcacgtccgtatataggaagtaattccggcatccgttttcgccttgatacgctggtgcgcagtccgttgagacgtccggtaacaccggagttttttcaggtgttccgttatcaaagtgcggatggacagggatatcagcctttaatgcaggctataaaaaacggaaatgcggttctcagcgagaatatatggcctgacggttataagggtgaccgtacgttgttgggaaaagaagtcgtgaatgtggatgattctacagacgtttataaaatagctgccgtatcgactaaggtacgttacaatgatttttggccaaattacagcgatcgctatatggctattcctcttacggaagcacaattggccgagattaatgatgacctgtatccgctcaatacggaagtttgcctgcgtgtaaagccgaatacggctcccggctttccggagcgtctgatggaacagtcggatacccagttcagtgtgggaaatctttttatactgaaggtacacgattacgagatgatacgtgaggattataatcgtaccaatgtcaatcagatgcagacgcggttttggatgatgggctttttgttggtgaatatcctgttgggaatagtcggtacattctggtttcgtacccagcatcgtcgtggagaactcggacttcgtgtcgcagtcggttccacccgcatgggactctggcatcgtcttaataaagaaggcttgttgctactggcactggctgctttgcctgctgcaattatttgttataatataggttatctggaactgacggaaggtggtatagagtggagtatcattcgttttcttatcactttttgtgtgacaagtcttttgatggctttgatgatactcataggcatttggttccccgcccggcaggcgatccgtatacagccggcagaagccttacgcgaggaataaaaaactgaagctatttgcattgttttcaatataataacttatctttgtaggcaaaatgttgaaaacaatgctgttttttgcttatgaaccgacaatattactgtttgtttgttgttttgttcttcgttgtttttgcccgggcggcggcagcagaacatacatacaacatactttttattcaatcttatacctcgcaaaccccttggcacaacgacctgaatgaggggctgaccaagggattcaaagagaatggactgaaagtaaatattactactgaatatttggatgccgatttttggtcattcagttcggagaaagtgattatgcagcatttttgtcagcgtgcccgtgacagaaagacggatatgattatcacagccagcgatgaggctttttacactcttttctcttccggcgattcgttgccttaccaagttccggttgtgtttttcggaatcaaatatcccgataaagaacttatagcgagtcttcccaatgtatgcggattcaccgctaatcccgatttttatgtgatcttaaagcaggcacaaaaggtatttccccaacggaaagaagtgatatgtgtgattgacaacagttttctgagtaataagggacgtgaggacttcaaacaagaatggcagctttttcaggaagagaatccggattacaagatgaaactctacaatacccagcatgaatcaaccaatcatattattgcggctatctgttatccccgcaatagttatgctcgggttgtggttgctcccaaatggtcaccgttcctttcgtttgtaggcaagaactccaaagcaccggtcttctccagtcagaatgtggggctgatgaacggtgtatttgcggcatatgacgcagacgcctatacctctgcgatgtctgctgcaaagaaggcatcgcgagtgttgaagggggaatctcccttgaaactgggtgtgacggagacggaacagggatttatttacgattataaacagctggacttctttcatatagacccggataaggtttcctccagtggcagtgttgttaatcagccgtattgggaaagatataaattattgtttattcttctttatccatctatcctggcattgttgatcgtctctatcgtgtggctcattcgtgtcaaccgtcgtgaagctaagcgacggatacatgcccagacccgcttgttggtgcagaataaactggtggaacagcggaatgagtttgataatatcttccattccatacgcgacggtgtgatcacatatgatactgatcttcatattcactttaccaaccgttctctgctgaagatccttcatttaccctcagaatcgggcggacggaattatgaaggaatgatggcgggcagtattttcaaaatatactataacggtcaggatatcctttacaagatattgaagaaggtgggagagactgggcagagtgtcattattcccgatggggcttttatgaaagaagtacatagcgaacattatttcccggtttccggggaagttgttccgattcattcaggcgggcagattaccggtatggcactttcggcacgcaacgtatcggatgaagaaatgcagaaacgtttctttgacatggccgtggaggaaagttctatttacccttggcagtttgatgtggagagtaatagtttcatctttccgcaaggttttcttgttcgttttggttatgatgagtcgattacttccatcacccgcgacgaaatggatcgtatggtttatccggaggatttgaaggaaatgcgtattctctttgataaaacattggcgggaaaagaaaccaatacccgtttgaatttccgtcagcgcaatgccaatggagaatatgaatggtgggaataccgttcctctgttatttccggtttgacgagagattcgctatataatatattaggtgtatgccaaagtatccaacgttataagacagcagaacaggaaatgagggaggcgcgtgataaggcacttcaggctgacaaactgaaatctgctttccttgccaatatgagtcatgaaatccgtacaccactgaatgctattgtcggtttctccgacttgttgagcgatacaagcggctttacagaagaggaaatagggcaatttatagcaacgatcaataagaattgcggattgttacttgcattgattaatgatattctcgatctgtcgcgtatcgagtcaggaacaatggaatttatgtttgccaatcataatttgcctctgctgctgaagacagtgcatgattctcaacaactgaatatgcctccgagagtggaactgttgcttcgtatgcccgataatgagaaaaaatacctggtgacagataatgtccgtctccaacaagtcgtcaataatctgatcaataatgctgccaagtttacgacttacggttccattactttcggatatgaggaagatgaagatcccgaatatacccgaatctttgtggaagatacgggagtcggcatatccgaagaaggtatccgtcatatcttcgaacgattctataaggtggacaactttacacagggagccggtcttggattgagtatctgccagacgattgtcgaacgtctgagaggaacgatctttgtgacttccgaagtaggcaggggaactcgctttactgtacgtatcccgaatttctgcgaataagactgaacgttcatttctgtgcatagtgtccgaaaatgaacactgatacatttctctaaccgattgatagtaaatgtattattcttttggcacatggtttgattctatctgactggaaaataccgtgtacaatgaaaaagaaaagtatattgtttgttctggctgcaatctgtctgcctttggcagtgtcggcacagaaagagagggaaatcaccttgaacgaagctatcgctatggcgcgtatgcagtctgttgacgctgccgttgccttgaatgagttgaaaacatcttattgggaatatcgcacattccgtgccgatcttcttccggaaatcaatctgaaaggaacactgcctaattacaataaatcttacggctcctatcagaatccggacggttcttacagctttgtccgcaacagcgccttaggtctttccggtgaactttccatcgaccagaatatctggcttaccggtggacaactttcactaacctcttccctcgactacctaaagcaactgggtaatagcggtgatcgccatctgatgtccgttcctgttactttaaaactgacccaacctattcttggtgtgaataatgtgaagtggaacaggcgtatagaacctgtgcgatatgccgaagcgaaagcggaatttatcacagctaccgaagaagtgacgatgcgggctattacctattactttgatctgctgttggcgaaggagactcttggaaccgcccgtcagaacttgacgaatgccaatcagctttacgaagtggctatagctaaacgcaagatgggacagatttcggaaaatgaacttctccagttaaaactttcagcattgaatgcaaaggctgcgttgaccgaagccgaaagtgatctgaatgccaagatgttccagcttcgtgcctttctgggagtgggagaggatgaaatcctccgtcctgttgttcccgagtcggtagattgtggtaaaatggaatataatatggttttgaataaagcgctggaacgtaattcttttgcccagaatattcgtcgccgtcagttggaggccgattatgcggtagctacggcacgtggtaatctgcgtagcattaatttgtttgccagtgtaggatatacgggagagagtcgtgaactttccagtgtctacaggaacttgcaggataatcagattgtgcaggtaggcgttcagattccgattctggactggggaaagagacgcggaaaggtacgggtagcgaaaagcaatcgggatgtagtactttcgaagatacggcaggaacagatcaacttcaaccaggacatattcttgctggtagagcatttcaataatcaggcacagcaattggagatagccaaagaggcggatggcatagctcagcaacgttacaaaaccagtattgaaaccttcctgattggtaaaatcaatacactggatttgaatgatgcccagaacgccaaagacgaggcacgccggaaacacatctccgaactttattattactggtattacttttatcagatccgtagtctgactctctgggatttccaggctaacacggagttggaagcagattttgatgaaatagtgcgacaatagggattaatcgggctatttgttgcttgtattgagtatttacaatatctttgtcacaagtaatttaaactatgattttaataatagacgacgacagtgcggtacgctcttcactcagttttatgttgaagcgggctggatatgaagcacaaacggtttccggtccccgggaagctatggaggtggtgcgttccgtagcaccggatttaatcttaatggatatgaacttcaccctttctactacaggtgaagaagggctgactttgctcaggcaagtgaaaatattccgtccggaaactccggtgatactgatgaccgcctggggaagcatacagcttgccgtgcaaggtatgcaggcaggagccttcgattttatcaccaaaccttggaataatgcggcattgttgcagcgtatcgagacggctttggaactggcaggctctcccaaagagacaacgcaggaacagaatgacgctttcgaccgccgtcatatcatcggccgtagtcagggactgacggaagtactgaacaccattgcccgtatagcaaagacgaatgcttccgtactgatcaccggagaaagtgggacgggcaaggaactgatagccgaggcgatacacatcaacagccagcgtgccaaacagccttttgtcaaggtgaacttgggaggaatctcccaaagtctgttcgaaagtgaaatgttcggccataagaaaggagcttttacggatgcttcctccgaccgtatcggacgctttgagatggcgaataaaggaaccatctttctggacgagatcggtgatctcgacccttcctgtcaagtgaagctcttgcgggtgttacaagatcagacgtttgaagtattgggagacagccgtccccgtaagacggatattcgtgtcgtctctgctaccaatgccgatttgcgtaagatggtgggcgaacgtactttccgcgaagatttgttttatcgtattaatctgattaccgtcagactgccggctttgcgtgagcgtcgggaggatattcccttgctggcacgtcactttgccgatcgtcaggcagaggccaacggttttcctcgcaccgaattttcggcggatgccttgcagtttctgagtcgcttaccttatccgggaaatattcgtgaattgaagaatctggtagaacgtacgattctggtcaatggaaagccgacgcttgatgccgccgactttgatgctcagtatatccgtcacgaagatcagaaagtcgccgaaggcgcatcctttgctggtatgactctggatgaaatagaacggcagacgattttgcaggctttggagcgtcataagggaaatctgagtcaggtagctacagcgcttggcatcagtcgtgccgccctttaccgtcgtctggagaagtttggaatcagtgtttagcagatagatgttactattattatgcgtataaaaggattctttggtatactcgttttcctgcttctggtcttggggggtggattgcttttcctttcaagccggttgaatatgatctatttctatataggagaggggttggtcctttttatcctgtgttatctcccgtttttctatcgtaagattgtgaaaccgctgaactctatcggaagcggtatggaactgttgcgcgaacaggatttcagcagccggttaagtcccgtggggcaatatgaagctgaccgtatcgtgaacgtcttcaaccggatgatggagcaactaaagaatgaacgtctccgtctccgcgaacagaataacttccttgacctgcttattaaagcctctccgatgggagtcatcctcaccacattggacgaggacctttccgagctgaacccgatggcgcagaaaatgctgggtgtccgtcaggaagatgttctgggtaaaaagatgaacgagatagattctccgcttgccgccgagttggcaaacgtaccgaaaggagaaacggctaccgtccgtctgaatgattcgaatatttataggtgtacgcattcctcttttattgaccgtggatttcagcaccccttcttcctgatagaaagtctgacggacgaagtgatgaaggcagagaagaaagcctacgagaaagtgatccgcatgattgcccacgaagtgaacaacactactgccggaataacctccacactggatacggtagaacaggcgctttctaccgaagaaggcatggatgatatttgcgatgtcatgcgtgtatgtaccgaacgctgtttctctatgagccgtttcatcacccgttttgccgatgtagtgaagattcccgaaccgacgctcacgcttgtcgacctgaatgacctcgcatttacatgcaaacgttttatggaaggtatgtgtaccgaccggaacataaaacttcgtctggagatagacgaaacgctgaaagaggtaaaaatggatgcctccctcttcgaacaggtattggtaaacatcatcaagaatgctgcggaaagcatcgagaaggatggagagattatcgtccgcaccctttctcctgccattgtcgaagtggtggacaacggcaagggaatcagcaaagaggtggaagcgaagctgttcagcccgttcttctccaccaagcccaatggtcagggaatcggactgatctttatccgggaggttctgatgcgtcacggctgtaccttctctctgcggacttatgccgacggattaaccagattccgtattctttttccctgatcaaatgtcaaacgagaacagttcttccgctatatagacctttttttgttctgaaatccctcctacctttgccccgctcaattcaataggatgttaaggtataagatatgagattaataattaaaggtgcagtagcgctctttcttttattggctatcagtattccgctaagtgcccaatacatagtgcagggtgtggtgactgattctctgaccagagaacccttatcttatgtatctgtacgtctgaaaaacacgaccgaaggaacgactaccggaagtgacggacgcttttatttcaaaactcatcgctccgaaggagtgcttgtgatctcaaccgtaggctataatgaatatagccggctgatccatccggcacgtaatctttcgtataaagtagcactttctcccgctacatatgcgctcaacgaagtattggtgaagcctaaacgcgagcattaccgtaagaaagacaatcccgctgtggagtttgtccgtcggatgatagaacatcgtgacgaccattctcctaatgagaaagacttctggcagcgcgaccgttatgagaagactacctttgcgctgaacaacttcgacgaagagaaacagaagaaatggctataccgcaaatttgatttcctgacagaatatgtagacacctctgccgtcaccggaaaaccgatactgaccgtatctgcccgtgaacttcttgctacggactactaccgcaaatctcctcattccgaaaagcagtgggtgaagggacgcaagcaggcaggagtcgatgaattcctttccaaacaaggtatgcaggctgctattaatgaagtctttaaagacgtggacatttacgagaacaacatctccctgttcaccaataagttcgtcagccccttatcccgcatcgggacaggattctacaaatattatctgatggataccttgcagatcggcggtgaaacctgtgcggaccttgctttcaccccctttaattccgaatctttcggttttaacgggcacttgtatgtcacgctcgactctacctactttgtcaaacgtgccgtacttaacttcccgaagaagatcaatctgaactttgtcgattatatgctgcttgaacaggaatttaagcgggcagaagacggtactcgtctgctcgaccatgaaagtatcaccgtagaattcaaactgaccgaaggacaggatggtatctttgcccgtcgggtggcggattacagtcgttattctttccttccgaccgaggaagccgataaagccttcaccaaaccggaacgtatcatcgaagaaaccgaagcgctgtcccgacccgaaactttctgggcggagaaccgtccgcaagcagccatctcgcaacaggagaactccgtagaccgcctgatggcgcaactgcgtggctatccggtctattattggacggaaaaggtgctatccattctcttcaccggatacatcccgacctccaaagaagccccacttttctatatcggtcccatgaatgccaccatcagcgggaatacgctggaaggaccgcgtatccgtgctggtggaatgacgaccgcatggctcaaccctcatctgttcggcaaaggctatatcgcttatggcttcaaagacgaaaggctgaaaggactggcggaagtagaatactcctttaaaaagaaaaaggaatatgccaatgaatttcccatccattcactgaaagtacgttatgaatcggacgttaaccaatacggacaaaactatctgtacacaagcaaagacaatgtcttccttgccttgaagcgtgaaaaagatgatcgtatcggctattaccggcaaacggaaatgacctataccaatgagttttattccggcttctccttccagctaacggcacgcaggcggacggatgaatcgagctacctgattccttttctgcggaaagacggtgaggtttactctccggttaaagacttctctaccagtgcggcggagttgaagctgcgctatgccccgaacgagaaattctttcagacacaatggaaccgcttccctgtatcgctggatgctccggtgtttacactgtcgcacacaattgccggaaaaggagtactgggaagtgattacacctataatcataccgaagcgggtatacagaaacgtttctggttttccgctttcggctatacggatattatcctgaaagcagggaaggtatgggataaagttccctttccgttgctcattatgccgaatgcgaacctttcctacaccattcagccggaatcctattcgttaatgaatgctatggagtttatgaatgatgaatacttttcgtgggacgtcacctatttcctcaacgggtggttgttcaatcgtatcccattgttgaaaaaactgaaatggagggaaatagtttcctgtcgtggactttatgggcatttgagtgataagaataatccggatatgacagacggtttgttcgcttttccgatagcaagtacccgtacaatgggaaaaacaccttacgtggaggcgggtgtgggtattgaaaacattttcaaggtattacgtttagactacgtctggcggctcacatatagggattcgcccgatattgacaagtccggcctgaggataagtcttcacatgaccttctaaaagttaaatcctgctaattgcaatgtttatatagcaaacaaaggtcgctttagtaattaattaatcttatttttgcatcaattttagtttaattttaatagaatagaaatgaaacaagaaattaaacccgctactggacgtcttggcgtgttggtagttggagtaggtggtgcggttgccaccacaatgattgtaggtacactagcctctcgcaagggactggcaaaaccgataggatctattacacagttagccacaatgcgcatggaaaacaacgaagaaaaactcatcaaggacgttgtgcccttgactgatttgaacgacattgttttcggtggatgggatatcttcccggacaacgcatatgaagctgctatgtatgccgaggttttgaaagaaaaagacctgaacggtgtgaaagatgaactggaagctatcaagccgatgccggcagctttcgatcacaactgggcaaaacgtctgaatggtacacatatcaagaaggctgctacccgttgggaaatggtagaacaactccgtcaggacatccgcgactttaaggctgccaacaactgcgaacgcgttgttgtactgtgggctgcaagtaccgaaatctacattccgttatcagacgaacacatgtcactcgctgctttggagaaagcaatgaaagataacaacacagaagttatctctccgagtatgtgttatgcatacgctgctattgcagaagatgctccgtttgtgatgggtgctcctaacttgtgtgtggatactccggccatgtgggaattctctaaacagaagaatgttcctatctccggtaaagacttcaagagcggtcagacactgatgaaaaccgtattggctccgatgttcaagactcgtatgctgggtgtgaacggttggttctctaccaacatcctcggtaaccgtgacggtgaagtgctggatgatccggacaactttaagacaaaagaagttagtaagctgtctgtaatcgacaccatcttcgaaccggaaaaatatccggatctctatggagacgtttaccacaaagtacgcatcaactactatcctccccgcaaggacaacaaagaagcatgggataacatcgacatcttcggatggatgggttatccgatggaaatcaaggtaaacttcctttgccgtgactctatcctcgctgctcctattgcacttgacctggtattgttcagtgacttggctatgcgtgcaggtatgtgtggcatccagacttggttgtcattcttctgcaagagcccgatgcatgatttcgaacatcagccggaacacgacctgttcacacaatggagaatggtaaaacagacattgcgtaacatggttggtgaaaaagaacctgattatttagcttaattaaataagtggagagttgaaagttgagagttgaaagtggttgcaatgtaattgcggcattagacaacttttaactttcaacttttattttggagcacatccaatcatcctccactctcaattttcaactctcaactctcaactattaatgaagagaccttcctttctacctgttttaataggcacgggctttggctctggtttttctccttttgctcccggtacggccggggcattgctggcttctatcatctggattgcactttacttcctgcttcctttcactgctttattatggacgactgctgctttggtggttctttttacctttgcaggtatttgggctgccaataagttggagtcttgttggggcgaagacccgtcacgtgtggtggtcgatgaaatggtaggtgtgtggattccgttactggcagttcccgataatgaccggtggtattggtacgtgatagcggcttttgctctgttccgtatttttgatatcgtaaagccattgggagtacgcaagatggagaactttaaaggtggagtaggggtaatgatggatgatgtactggcgggtgtatatagttttatcttgatagcggtggcacgatgggtgattggctgaaaagagttgcacggatgatctcgcagaagggtggagtctttatgtttttaagggcgcagctttcggctcaaatggcgactattgcagactttctggtgactatccttctggtaaggctatttgatgtctactatgtatatgctaccttggcgggcgctatctatggaggaattatcaattgcattatcaattataaatggacttttaaatcgaaagggaaaaaaacgcatgttgctgtaaaattcataatagtgtgggtttgcagtatttggctgaatacgtgggggacgtacactctgacggaatcgttagcgaaaattccgtgggtacgtgatacactcagccaatatttcggtgacttcttcatcatccctaaagtggtggtggcagtcattgtagcgttgttctggaattataatatgcagcgtttctttgtttaccggaatatagatataagaagcttgtttaaaagaaattgaaagaaaacagaagatttagataaaaacagatttaggtatatgaattacagagattacttacagcaactgatttataagattatcaatcctttgatacatggaatgattaaaataggcatcacccctaattttatcactactaccggatttattctgaatgtggtagcggcaggtatgtttgtctatgccggtatctgtggcggacagaatgatttgtccattcttggatgggcaggaggtgtgatcctttttgccggattgttcgatatgatggacgggcgtgtggcacgtctgggaaacatgagttccaaattcggtgccctctacgattctgtgctcgatcgttacagtgagttgatgactttcttcggtatctgttactatttgtcagtcaaagactatttcatttacgctatcattgcgtttgttgccctgatcggttcgctgatggtgagctatgtgcgtgcccgcgccgaaggtctgggcattgagtgcaaggttggatttatgcaacgcccggagcgtgtggttctgacaagtctcggagccttgttctgcggtgtattcaaggatattaccgcttttgatccgatgctgatattgatggtgcctttgacaatcgtcgctgtgttcgccaatatcacagctttcgcacgcgtgagacattgctataaggtgatgacagcgaacgaaaagaagaatgactaattaaaataacatccttaatgataaaaacaattcaaatgccgtcgaagaaagaaaccctgaccgttattgtcatcatggctctttttcttctgctgacagctgcctgtatcggactccgttccgaacatctgctgatggcggcactctatctggttttattttttgccggactacctacccggaagctggcagtggccttactgcctttcgccattttcgggatctcgtatgactggatgcgtatctgccccaattacgaagtaaatccgattgatgtggccggactttataatctcgaaaagtcgttgttcggagtgatggataatggtgtgctggttactccttgtgaatactttgccgtgcatcattgggcggtggcagatgtcttcgccggcatcttctatctttgctgggtccctgtgcctatcctgttcggactctgcctgtactttaagaaagagagaaaaacttatcttcgctttgcattagtctttttgtttgtcaacttaatcggctttgccggctattatatccatccggctgctcccccctggtatgctatcaactacggtttcgaaccgatactgaatactccgggtaacgtggcgggtctcggtcgcttcgacgagatttttggagtgactatcttcgactccatttatggaagaaacgcaaacgtctttgctgccgttccttcccttcatgcggcatatatggttgtggcattggtgtatgccatcatcggcaaatgcagatggtatgtgattgcccttttctctgttatcatggcaggcatctggggaacagcgatctactcttgtcatcactatattatagatgtactccttggaatctcctgtgcactgctcggctggctgttctttgagtacggactgatgaagattcgcggattcagaaacttctttgaccgatattatcagtatattaaatagtgaagaacaaataccgcaatatattcctggcttttggcattgtcgccgtcctgatcatgatattcactttcgatatggattatcaggaactttgggcaaatttgaaaagggcaggagtatatttgcctttggtattattgctgtggctgttcgtttatctgattaatactacatcgtggtacatcattatacgtagcggagggaagccggggttttcatttgcccggctttataagtttaccgttacgggttttgccctgaattacgtaactcccgtcggactgatgggcggtgagccgtatcgcatcatggaactgaaaccgtatataggagtggagagagccacttcttcggtgattctctacgtgatgatgcacatcttttctcatttctgcttttggctgagttctgtcttgctatacctttgcctctatccggtagggtgggtgatgggaaccattttgggtgcaatcaccgtcttctgcctgctggtagcagtgctgtttgtgaaaggatatcagcatgggatggcagtcgctttcgttcgcctgggcagtcatcttccttttctgaaaaagaaagtcatccgttttgccgactcccatcgggaacagttggagaacatagataaacagatagccctgcttcatcaacagaagaagggagctttttatgcggctttattcttggaatatacggcacgtgtggtcagttgtctggaaatctggctgatcctcaatgtgctgacaaggagtgtcagttttgcagattgctgcctgattgcagccttctcttctttattggccaatcttttgttcttcttgcctatgcagctgggtggccgtgagggaggatttgcccttgcggtaggcgggctttccctttccggagcttatggagtctatgcggcattgatcactcgcgtgcgtgagatggtctggattgtgatagggcttgctttgatgaaggttggaaataaaaagtagccttattttactataatttcccagtatccgtttttgtttgatccaactcgctgaatcatacctttttgctttaatgatgtgatcaggcgttcgctatgccttaggctgtgtgatatgaattgtaagttttgatggcgtttcgtacttcctgtatttcacggatgggagctactatatgctttccgtcaaggatatctgtaatttgactttcagataaggtgtttccttcaatagccagtgaaccttgaatggttttaattcggttgattttccgcaatagcaaagcatcttcctgttccatgcggatggcatatcgttctaccaatgcggagatatccgctattaagtggatagcgcgggaagatatggcgaaaggcggagtatacatgctggaatataaaaagtttataagtttattactttctacaaagatagcattaatttccttcagaggagacatcctgatgatctattttataaaggtagaaactccaactgctccgacttagtttggtcgggcaattggagttttcttgtttataggctattcaattaaaacttttcttgatttctgcctcatgctttccagttattttccgcatcgaagcaagggcacgctttcacccattcttccggttctatctctccgttctcattccggtcgggactaaggtcacggtgaccgcatacgcggcattccggataatctttcagtaaagtaagaaccagtacccgcagtgaatgtttctgccattcggtccgggtatctttggggcgacctttgctgtcgagcccgccttcatagcagataccgatactttctctgttgaaacctttggcgtgggcaccgaccttttctatcggtcgggtagactttatatccccgtttttgcggatataaaaatgataacccgctccgttgaatccgcgtcggcgatggcagacgtccaggtcatattccgtgaaatccttgtcttcgcgtgtggcggagcagtgaattacgattaagttgatcgttctcataatctgtccggcattaagcttcagagatggatgcctcgctttgtgtacgctgtaggcactctttgtttacgcactgtaatgtggcagcttgtgccagttgttctctcaacgaaaagatttcggtgtgcatttctttcactctcgcgctcaggtcgaaataatctttcagtaccttttccagctgttccatcaggaaggtatactggtctttcaccagttcgctgaattctttgacgtcttgcgccatcgctttacgctttttacgattacccaggaaagggaggatagtcataataatctcgataattttatctagcattttttttaatggataattgataattgataatggggggagttgtacattaaggttagttcgatatagtatctctcattctgagcgaagcgacgaacctgagactgactaaaagtcggtagtatcttacttctcctccttcgggaaggaggagtccccgtagggggaggtggtaggtgaatgcataactctgttatttacaatagaataggaataaaccttgttttacctaccaccccggctttcagccacccctccttcccaaagggaggggaattgagatactattgacttcttagtcagtttcaattgggagggctgctccagtgttttgtactgctctttcccaaaaaagtcctgttaaactgtcgggtccggagcttcttcatcgcctccgctgtttcctccgcctccgctatttcctccgcctccggtgtttcctccgccggcatttccgccttccgtgtcacctttgcttgctagtacgaattccacgttgttttcgcttcgtgtgctggtgtgacttgcgttcaccagatgcagtgctttatccgctacaaaccggacattcaccttgcggatgcttcggaccgtgcaatctttttccttctctgtcccctcgctgcacagtgtgatgtgaaacgtacccagaccgtcgatcttcactttgtcaccttgggtgagtgacaggcggagttgctctacaaaagcttcgatggcatgttttacatctcctgctgtgagtgaagagttggcttcgatggcatctgccagtttttcgacgtccatcactcttactgtacccgatttctgacgtacgtaatacagcatcggggaattctcctgacttacgtactttcttcgctgatagcgttctactgaaacattcataaatttaaaaagttaaggtttaagtaataattattttgtttctctatgacattacaaatatacgaaatataagaggcgaagtcaagcattatgccatttatttcattgtaaatatgaaataaaatcggaaaatattagaaataatattatgtaatataatattgttttgattctgtttttattttgcttgtttcagtaatacttccaatggtggtgtatagtccgtaattttcgttagagaaggattgtggctgaagtatgcgttccctgtctctccattgcgttgtttggctacgatgactacccccagtccttcggtcggataaccgctttcccggtcggtagtgagccgtgccagtgcagggcggtagagcagcattactacatccgcgtcttgctcaatggcgccgctttcgcgtagatggaacagttccggccgaccaccgggacggccttccgattcgcggtttagctggcaaagcaatacgacgggaacgttcagttccttggcgagcaatttagccttgcgggtggcttgtgccacttcctgttcacggttgcggttcttctgtccggtgttcatgtcgcaaagttgcaggtagtcgatgatgatcagatcgcatgcactcttgcttttaaggagccgtgcgctggaacgtacatggtccatactgatcgatgtgctgtcgtctacgtgtatcggtagccgtgccagttctgcggcggtggtgtgcgcttccgctacttcgtgcgggttagggatgcctgtgcgccagcggtaagggttgatgtcgctggcggacaacagccagcggtcggcaagtcgttctccttgcatctcaaggctgtagacggcgacggcatgtccctgcatggcagcctgccgcgccagatggagggcgaaggcggtctttccgaccgaggggcgtgcggcgatggcaatgagttctccgttttgcagtccggacgtcatgcggttcaggtccgtcaggccggtggggatgccggtaattccgtttacgcttttggcgatacgctgttcggcttcttccattgtgtcggtcatcagtgcgtccatgtcgcgcatgtggtcgttgtggccgaattcaccttccaggcggtcgagcaggttgtgcgcatctatcagcgtatcggctatgtccattgtttcgtccagggagcaggcgaggagtttgttgagtcccagtatcatttcccgccgcaggtatttctcgtgtacgatctgcatgtgatattcgatgtgtgccgaggtggctactttgctgctcagttgcgtgataccgaatgctccgccggcttcttcgagcttgccccggtgggcaagttcttcttttacggtgaggatgtcgatcttcattcctgcctggtacatggccagcagggcggcgtagatcacttggtgacgcatgctgtagaacatttccggacgcagcgtgtcggctacgagcggcatggcttcctgttctatcaggcaggcgcccagtatggcttcttctatttccggagcctgcggagaaactctgttgtcagtattcatattcattcagaaaggctttattggataaataactgcaggcatgtaacgtgaatttcatgtttgtctgatgataataatattcttcgatatggtcgatggcgagttgctgttctttttcgctcagctttttccagatacgctgcgccttggcgatgttctctttggggagctgcaggatgttgtggtagtcgtcccagaagaggcggaacttttcgttgctggctttttgtgtgttttcttttttctcgccgaggagtgtcgagatatttgtccagttttcgtagtcgactactcggatatgcagggcggtggtgtcgttgtgaggaatgatttcgatgattccgtttgttttcagttgttgtatgaagcggtaggttctgctcgttggccagtggaaaatggcgctccaactgcggtagctgtgcaggctttcacctcttttgcacacgatggtgcgtctttgatggtcagtgagctttgtttccgagtagttgacttttataagaagcttcagaaaagcttctatttctccttcatgtgggctgcagtctataagttgctctttcagcagagctttggggataatgatgtagccatatccgatggcttgacaatccattttttgcatatgatattctgtttttaaattttgtccaaaagtaggttgatcgttgccggaatcctaaacggatgtgcgtgtttggacgtgttgggatgtaatattccttgtgtggacgtaaattgctgtttttgacatgtgttgtttttgtgtggtacacgttggaggaagatcgtgaaacagaggcttcgtttgatgcgaacagagcttctgtttatagtaaacgaagcctctgttcggtcattttggagcctctgtttggagggtggaaaaagggcatttttgtggaacgcacagcggaacactctggagagtgaggtaatcttctgacatttaatggaatatgtctgttgagaaaaatcttttgaaacgcagggcggaaccataataagggataactaataaattatatatttaaaaatatatagttcgattttcgctttttgggcgttcaaactcgtttgttgtccgactcgtttgcgtggttttccgacagtgaaatgatgggtggtccccagtgcgcccagatgatttgctgcattttcggacttagcaaagtcgtatgttcggtgtagcttgctgcggtgagctctgctttgagctgcaagttggcgtctatcgtgtcgcgcatcctttttctagctgcattgcagtccgaatgtccttgaaagtattccgtagctaattgggtaaaatgtttaaatcccttgatgatgtaatctttggatacttctttttctacttttatcatattattatatttagtttgtataaaccattgtttgtggtttattttctgcaaagttatgaaaaataaattgattgaatagtataaaataatttagttttattttttgtttttacatctgtaaatttatatgtatgtacctgcttaattaaatttgtaattagggatgtttgttgattataataactatttatttgtggcggaaattttatgaaaaaaaacatagcggtttctttttttgttgttttactctcagacgcatggcgaaatttgttggtcggatcattctgctgatgaatgagtatatgtctgaagggtattttggagagatgctaaaatacccttatatttatcgcgtaatttatttaatagtgattaaaatgttaaaagtagtagcatttatgaagcaagtagccaagggactacagatggagggaaactttggtactgcgcacgtctaccgtagcagtctcaatgccatcattgcttatcgtgggaaaggggattttacatttcatgaggtaacccctgagtggttaaaaggcttcgagattcaccttcgtggccgtggatgcagttggaatactgtatctacttatttacgcacatttcgtgcggtctataatcgtgcggtagattgtcgtggggctgtttatgtaccgcatctgtttcgttctgtatataccggcacgcgtgcggaccgtaagcgggcgttgtgtgatgaggatatgcagaaggtttttgccaaattaccttcgtctcctgccgtgactcctgctatgcgtcgtacacaggaactgtttgtcctgatgtttcttctccgtggtctgccttttgtcgatcttgcttatttgcgtaaaagtgatttgcacgacaatgtgatcacttatcgcaggcggaagaccggtcgtcccctgtcagtaacgttgactcgggaagcgatggtcttattaaagaggtatatgaaccgtgacagttcttctccttatctgttctctcttttggagagccgtgaagggacgaaggaggcgtatcgtgaataccagttggcattgcgcagcttcaatcagcaactgttgttgctggggcaattattagggctgggcgacaggctgagctcatacacggcccgccatacatgggcaacgacagcttactattgtgaaattcacccgggcgttatttctgaagctatgggacactcttcgatcacagtgaccgagacgtatctcaaacctttccggaataagaaaatagatgaagccaataaaaaggtggtggattttataaagcgctcaattccaatagcaatgtgttgaatttaagcctgttacttcataggtaacggagctaaatagcgttgcaaagatggagatattttggaaaacatgcaaacaaaaaagatattttttctgataaactactaaaaaaagagaaataacacgataaaacggcggatttctttttattagacctttataaccttctaattatattcaaagatttccctcccctctgcctcctctttgaagcaggggtaaataagtttcattactaaatcatacagtttttcataaagaaggcttcatgagagccaggacaaaggtttgcccgttacctatgaagtaacgggcaaaaagtattgggagtaagtttcttgttcatcctctatggagcatggacacaggtaaaacaaaaaaagaaaaggaggttacactaaaaatgaatggggacaacacatgggattattgaatcgacatcgagagattatatttttattatttaatttataaattaaaagtttttttattatgaacaaaaagtttttaaatgcagtcctgtttggagcgttattagcgtcttcgacaggcacatttacatcttgtaaagactacgatgacgacatcaatggtctgagcgaacgtgtggatgcagtcgaaaaaacattagctgacttgaataccaagttcggagcattggcttatgtgaaatcggtatcctttgctaatggtgtattgacagtaacagatcaatcggggactcctactacttatacgatccctgataacgatacgaatactacgtacactttggatgtaactagcagtagagaaggaaatgtgactactgttactgttactctgacaggatctgacaattctaagatcgtcaaaacatttacaatcactgataacgatacagtaactcaagacactaaattagatcctactaagttctggatggactcagaaggtgtgatgtggtatggaacaaaggatgataaagaaaactctattaaaacaggagtagctgttccaaaacaaccgcaacatgataaaacgactgtaagtgttgttcagtataaagatgagactggtgttgtagtaggatgggaaatcttagtagataatcaacctctctcaactaagttgcttattcaggatgtactgccaatcacaagctttgaatatatcccaacgaagattttggccggatggggtgaaagagtaattgtgtttgaagaaaactcatacaaacagaaaacgattgtagctaacgaagttaaaacatctgcaactgctactttatatatgtcaaatgtagctgctcctcaatatcgagttaatccgtcgagtgctacgcttgctcaattgacagaagaaggtaaagctcagattttgaaacagactgtagaacaggtaacaagaactccgggtgtatttattgactggaagaaaactacaatagaaaatggcataatgactgtgtctctggaagctgaccctgctttatttgaagatgaagtagataaattggacatgattgctctccagtttgaaacaactgcaaaaaataaagttaccactgaatatgtaggtgttatcaacaaagatgctgagattgatgttgtcttgactgataaagctgtaacagctactaatccgggagatgatgctaatcactttgctattaccaaggctgatgctgaagctcaggtggctaagattgatgataagaatatgccgatgacaggaaatgctgctttagttcagaatgttacttattctgaggctattgctggtatcaacttgacagaacttgtttctgcatgtaatgtaaaggatgctgctggtcataagttctttgactatactaagtatcctgatctcacattgtcttttgaagctgttgcttataaagttaatgaaactccgcaagagcgctatatgagcttagatggtgtaacattcaaggctgtaaactatggtaatgtgaatgaaagctgtattggtaaagctccgatggtactggctaaattgacagattcacataatggaaatgcaatcgttgctgctgcctatatcaaattactgattgtgggtgacgctgctgctaaaccggaaccggatatcactatcactgaaaatgctactattggcattgattgcaacaattctgcttacacttggtcaactaatgacgagttcatgagtactcaggtgtatacattcagtacaaatgaaaaattgacagcattgagtaaagaacaattccatacactctatggatatgctgctgctcctgttgttggatttgataacgtaggtacttggaatgtaacagaaatcctgacagctggtgataataaggctaaccgtggagctaaattcgaattgacaactgcaccgttggaggctaaaacttatgtggcttatgctgtatatgagaaaacaacagatgctgatgttatcgtttctattgcaaatggtggaatgtatccgaaatatgttgctattaagcatgttgtaaaagtagatcctatcaactttactgcaactgctaaagagaaagcgcccaatgcttggaatggtaatacagcttctatctattgtcagactcctggtactactaacacaacgcagattatcggtgatttgaatgaactcttcgtaggcggtaaagttcagttcgattattccagctcatttgatgctgggaagttcccgagcttcgtagctgataatatggagtatacattcgtgttctctgaaaagaacttgaaagctacacgtggtttggtaacaggtgttgatggtacacaatatcaattggcgttgaacgctgacaagactgaattgcatgctgttggtaaagacttgaccggtactgctgttgctagtgcaataactgcagataatttggtagcaagcttgtctgatgctaataataatgatgttacatttgcgaatactgctgttgctaagaatctgttgaataaagaagcccgcggtgctgatagcttctatgcagttatggacatcgtttatgaaaatggttgtgacatgacagtaccagttactaacggtgaattcaaccttgcctttatccgtccggttaatgtttcttctgatgcaagcaagttctttactgacggtttgaacgaaggtgatcctgctaataccttgaagttaggtgaacttgttacctttacagactggagaaaagattctccgctgaatagcttcgccgctaatttggattactatagatattatggtgtaactaagattgaatgtaagggtaatatagcagatgtagttgaaacagactggactggaacaagaaaaacactgaaggaagcatttggtgctgaattggctagtcagattataacaattacttctaagaatgttacttatactactgctgaggtaactgctgttcctgactttggtactgcatcttatatcaagagtagtagagttgagattaaagactacaagctttacattcctttgactattacttacacatggggtactatcgaggaaacaattgaagtacaggttaaagctacaaaataatttggactaagaagtaatgaggttgtgatttatgcacaacctcttactctctttttttaatgcagctaaatactgtatagaaagaggttgcattctcattattgtgagaaaatataagtgtggaaaaggagagtgtgacaagaaggacacgctctccttttttcataatagttaatatacaatttaaatataacgaacgagatgaaactaaaaagaaatttggtcctggctgttctgtgtttgagtacgatggctacttttggacagagcgaatctcaatcttcacgtataaaggaagaaggcaagattactttcaaacctcattggttcattcaagcacaaataggagcagcccataccgtaggtgaagcaaaattcactgatcttatttctccggcagcagctcttaatgtcggttataagtttgctcccgcattcggcgcacgtgttggtgtaagtggctggcaggcaaaggggggatgggtgaatccgcaacagacctaccaatataaatatctgcaaggaaatgtagacatcatggcggatctcagtactttgttctgtggtttcaatccgaagcgtgtgttcaatggctatctttttgccggagcagggctgaaccgtggttttgacaacgatgaagcaaatgcgctcgatacccgtacttatgagatggaatatctctggcaggaaggtaagtttctcgttgccggacgtttcggtcttggttgcgaccttcgtttgaatgaccgcttgtctattaacatcgaagcgaatgccaacgccttgtctgataagttcaactccaagaaggccggtaactgtgactggcaactgaatgcccttgtcggtgtaagtatcagactgggtaaaagctacactaaaaccgctccggtctattacgaaccggaaccggtagtgacggaacaacccaaaccggctcctgtagtagaacaaccgcaacccaaaaaggaagtggtgattgaaccgttgaagcagaatattttctttgccataaactctgcaaagattcaggacgatcagcaagccaagattgcttctctagtagaatatttagagaagaatgctactgctaaagtgagcgtgacaggatatgcagacaaaggaactggtaatgccagaatcaacagcaaattatcggaaaaacgtgcgaataatgtagtggaagctttgaaagcaaaaggtattgctgccgatagaattacagttgcttataaaggtgatactgttcagccatataatactcctgaagaaaatcgggtaagtatctgtattgctgagtaaatatggcacacaaaggctattaagaatttaaaatttccctatttctcatgagagagttttccccacttctttatatatatcatttatataaggtgttctctctgagaatcttaagaggtccgtacttgtgaaagtccgtacttctgcaataataaccctttcttcacttaaatgtgaagattacattggggaatagttggaaaggtggtgcttgcgaaagtactcctttctcttacctatttcctgttggaggatgtctccctttttcccacggacatcctcttttatacaaaaaggcgactcatactgaatgggccgccttttctgttatttaatctcgatttcctccttcatatcgatttcctctccatgtgtatcgtagaacacatattgcaggaaagcgagtttctgacttggaatgatcttgataccgaatccgtatttcatctgccacttccgtctgagggaaacgagtccctgattgatgaaggcggcgacatacggatggacgtgtaacgagaatttctttaccttcagtttgttgaccagataatcaattttactctctaaagtgtccgtaaagagaatggacgatttgatagtaccttttccgaagcaggtagggcagatttcggtcgtgttgacgtccattgccggacgcacgcgttggcgtgtaatctgcatcagcccgaatttgctgagcggcagaatattatgccgtgccctgtctttctgcatgttggcacacattcgttcataaagcttctgacggttttcggcttcattcatatcgatgaagtccacgacgatgataccacccatatctcttaatcgcagttggcgagccagttcgtcggcggctcccagatttacttcgagtgcgttaccttcctgcccgttggcattcttggtgcggttaccgctgttcacgtctactacgtgaagcgcctcagtgtgctcaataatcagataggcaccactcttgtaagagactgttttaccaaacgatgatttaatctgcttggtgataccgaaattgtcgtaaatgggaagctggcctttgtacagtttcacgatgtttgcccggtcgggtgcgatcagtgtcacgtagtctttgatttcattgtacacagcctcgtcgttgacgtgaatattctcaaaagaagggttgaagaggtcgcgcaacaaacctacggcgcggctggtctcttcataaatcaacgtcggatacttggtggctttctgtactttcgccattgcatcttcccaatgcttgatcaggactttaagctctccgtcgagttcggccacgcgtttgccttcggccactgtgcggacaatcacaccgaagtttttcggtttgatgctcatcaacagttgtttcaggcgggcacgttcttcgctcgatttaatcttttgcgaaacggaaaccttatcattaaaagggatcagtaccagatagcgtccggcaaacgaaatttcggacgtcagtcgcggtcccttggtagagataggctccttaacgatttgcaccaccacttcttgtccgacctttaatgtattggccactgtgccatccttgtccaggtcaggaagtagggttgctttactgatggagttcagcttctttttgtcgcttaaagtctgctttacaaacttttcgagtgagttaaattgaggacccaggtcaagataatgaagaaaagcgtctttctcgtaaccgacgtctacaaagcatgcattcagtccgggcatcaatttcttgatacgtcccaaatacatattgcccactgagaaagaaatgtttcttccttcgctttgaagttccaccagactcttgtcttcgagaagggcgatggagacctctttgggctgtacgtctattacaatttcacttgtcactgttttgctttcttattattgattgaatctcatttatatgaacaacttttttgacaaaatgttcatttagggttagctacttaaacaaagaacaaacttgaaagacatgtagcttcgcaagtttgttctttattctgtttgatcagacttaaaaattattttttgcttttatgtctgttctttcttagtctttttttacgcttgtgcgtagacattttatgtctttttttcttttttccgcttggcatagcttcacattttatgggttaatactcttgtttattatttctttactgaaattgtaaatgtcttagccggtttgaaggccggaatgttgtgctctggaatgatgatagtagtattcttagaaatattacgagctgtcttttgagctcttttcttaactacgaagctaccaaacccgcgaaggtatacattctcatcgttagacaatgagtctttaacagcttccataaatgcttcaactgttgtaagaactgttgtcttatcaataccggttttctttgtaatctcgtttacaatatctgctttagtcatttttccttaaaaaaaatattattactaggttcttgctaattttttggactgcaaatatatagctttttggtctcctaaaaaaatatattctgcacatttttctaaaaaagtggaggcattaagttttcttagagacaaaagagttacttttgtactgcttttggatagtatatacgagataaatgttagatgatagatcgaaatcaggaatgaatatttttagtgaggctatagttgaatggtataaagaatacaagcgtgatttgccttggagagaatcgtcggacccgtatcggatctggatatcggagattattctccagcagacacgggtggcgcagggatatgattactttctccggtttatcaaacgttttcctgatgtgaaggcattggcagacgctgacgaggatgaggtgatgaaatactggcagggactgggatattattctcgtgcccgcaacctgcatgctgcggccaaaagtatgaatggagtttttccggaaacataccccgaagtgctggcgctgaaaggagtaggggagtatacggcggcagctatctgttcttttgcctacggtatgccttatgcggtggtagacggaaatgtgtatcgggtactttcccgttatttcggcattgatactccgattgactcgacggaaggaaagaaactgtttgctgctctggcggatgaaatgctggataagaaacagccggctctttataatcagggtattatggacttcggagcgatacagtgtactccacagtcacccgattgtttgttttgcccgttggcggatagttgttcggcactttcaacaggaagggtgactcagcttccggtgaaacaacacaagacaaagacgacgaaccgttactttaattatatctatgtacgtgcgggcgcgcatacctatataaataagcggacggcaaacgatatatggaagaacttgtttgaactgccactgatagaaactccggttgctttgtccgaagaggagtttcttgcattgccggaatttaggtcattaatagcatcgggtgagaatccggtgatacgcttagtctgccggggtgtgaagcacgtgttgtcacatcgggtcatctatgccaacctgtatgaagtggctttgcccgaagacacgaagtccttcgctaactttcagagaatacgattggaggaattggacaagtatgcgatttccaagttggtgcagaccttaattcaggtaataggtaataagtaaaaagtaggtaataagtaataggtattaagtattaaccattcggtttatagcgcagcttattacctattacccattacctattacttattacctactttttacttattacttaaaatacttgcatactattgttattctgtttaattttggcagcagatttaaataatagaatcataaacttgatacatgtatgtcagtaaataaagtgatattgataggaaacgtaggacaagatcctagggtgaaatatttcgatacaggttcggcagtggcaacttttcctttggctactactgatcgtggctatacattggccaatggaacccagattcccgaaagaacggaatggcataatattgttgcatccaaccgtttggctgagattgtggacaaatatgtgcacaaaggtgacaaactgtatctggaggggaaaataagaacccgttcatatagtgatcagtcgggcgctatgcgttatatcactgagatttttgtggacaatatggaaatgttgtctccgaaaggggctaatacaggtgcgggagctcctcaaccatctgcaacacaggctcagcagccgcagcagatgcaacagccgcaacaacaggcgcagccgtcacaggcacagccgatacaagataatccggcagatgacttgccgttttagatactgtgataatgtgtcaataggctgatggctgattggcacattatcttttgtttaactaaaatacatactctttggactcagatggttatttaagccaattggctgaaattttcaacggtattaccgtaaacactccttcaatctctgctattatcgccatagtactggcaggtgtgctcctgcttgcttccggctttgcttcggcttctgaaatagcttttttctcactctctccttcggacttgaatgatattgacgaacacaatcatcctgctgacgaaaagatcagcgcactccttggagattccgaacggcttctggctacgatactgatcactaacaattttgtgaatgtgaccattatcatgctctgcaacttcttcttcatgaatgtattcgtgtttcattctcccttggcggagttcattatactgactgtaatcctgactttcctgttattgttgtttggagagatcatgccgaagatttattcagcacaaaagacattggcattttgccgtttctccgctccgggcatctattttctggaaaaactgtttcatccggttgcttctatgctggtgcgttctaccacttttctgaataagcactttgccaagaagaatcataatatttctgtggatgaactttctcatgcattggaattgacggacaaagctgaaatttctgaggaaaataatattttggaaggaattatccgcttcggtggtgagactgtgaaagaggtgatgacatctcgtcttgatatggtcgatctggatgtccgtacccctttcaaagaagtgatgcagtgtatcattgaaaatgcttattcacgtatccctatttattccggttcgcgggataatatcaagggtgtgctatatatcaaggaccttctgccacatgtcaataagggagataatttccgttggcaatcattgatccgccctgcttattttgtgccggagacgaagatgattgatgatctgcttcgtgattttcaagcgaataagatacatattgccattgtggtggatgagtttggaggtacttccggactggtgacaatggaggatattatcgaagaaatcgtaggcgagattcatgatgaatatgacgatgaagagcgcacgtatgtagtgctgaacgatcatacatggatatttgaagcaaagacacagttgactgacttctataagattgcgaaagtcgatgaagatgaatttgaaaaggtagtaggtgacgctgatacgctggcgggcatgctgctcgaaataaaaggtgagtttccggcattgcatgagaaggtgacttatcacaattatgagtttgaggtgctggagatggatagccgccgtattctgaaggttaagttcacgattcttccgaaggagatggatgagtcggagagtaaggagtgatgagtagataaggcctgttcgggcggagaaactataatcggagaagaaattataaaccaaaaacgatgggattatttctgcaacataagacggttgatatgcagtgggctgtctggaagatggaggaatctttggatacactgtttagtcttttgcccgatgccagaagagtttcttgtgagcaggaaatgcagcgttttacttcggaccgaaggaaactggaatggttgtctgtccgtgtgctgctatattccatgttgcaggaagataaagagataggatattcatcggaaggaaagccgcatttgacagacaattcttcttttatcagtatttctcatacaaaggggtatgtagctgtgatacttagttccgtagctcctgtaggcattgatattgagcaatatggacagcgtgtgaaaagagtgtacgatcgttttatccgttccgacgagcgagtagaaccttatcagggagatgagacttggagtatgctgttacattggtcggcaaaggagacaatcttcaaatcaatggaaaatgctgacgctgatcttcggaaactttgtttatcacatttcattcctcagagcgaaggggtattccaggtgcgggagtatgcaacggaacggcagcaattgttcaccgtcggttatcgtatttgtccggactttgttttgacgtggactgtcactatttgaagcatatttgcatattgataagcggtgaataatgagtggaatagtccaccaattattcaccgcttatctttggttacttatctttcttgttcagtctgtaacttaatgctcccgacggacatttactgatttgtgcaattagctcttccgttgtagcattctcgatttgtacccacggcctctctttcgggtggtaaacattgggtaacatttttacgcagattcctgcatgctggcacatttccggctgccatacaatggttagttcgccattggtatattcaactttttttcccatatctatacttatttaatatgaatgccacgcataacaattctcttccattccgggtgtttatgaatgtatccggctacaaacggacaaagtggaactaagcgtaaaccttgtcgttcgatatccgccaatgtcttttctgcaagctgtgaaccgactcctcttcctccaagggaagcggggacttcggtatgtacaagatagatttctccattatttgatttgatatagtctatctgggctatcttgtcatcgatctgaaattcataccgatgtttctcctcattatcgattaatttataatcttctgccataactttacgtattaagtttgattataatataaacacttgaggattgattttgtttataaagaattttctgcttgcttacaaggtcattgccatttgtcttgtctacctgctatacagacaatcgttctaactgaacggtaaaatgccgcatcaagggggcttcccaagcgatgcgcacaccacgggtgatcgtttctctccgttcgaatacgtttctaagtgcggcagctattacgttcatgtgattgtccgtatataccctgcgagggatggcaaggcgaagtaaatcaaggccgttaaagcgattttcgtgagtgatagggtcacggtcggcaaggatgtaaccaatctcgcagccgcgtatgcctgcctccagataaagttcgacggttaatgtctgtgcgggaaattcttctttcgggacatgtgtcagtactttggaagcatcgacgaaaatagcatggccgccggcaggtcgttgataggggatttcgtattcgtccagtttctgggcgaggtattctacctgtttgatacgtgtttccaggttatcaaattctgtgttttcgtcaagaccgatagcgagggcgttcatgtctcgtccgttcatgccgccgtaggttaagtacccttcgtattgcacgcagaaacctttggcaccttcataccattctttgcgtcgggtggcaatgaaaccgcccatgttgactatgccgtctttcttggcactcattgtcataccgtcggcaagatcgaacatttcacgggtgatttctttgattgatttgtcttgataaccttcttcacgcatcttgatgaagtaggcattctcagcaaagcgggcggagtcgaaaagtacaggtttgttgtatttatcggcgatagcacgtacttcacgcaggttttgcatggatacaggttgacctcctgcggtattgttggtaatggtaacaatgataaaaggaatgcggtcagcatattcgcttaatgctttctctaatttggcagggtctacgtttcctttgaagggaatttccagttgtgtattctttgcttcgtcaatcgtacagtccagtgcgatggcgtgccgtccttcgatatgccctttggtggtgtcgaaatgcgagttgccgggaactatgttgccttcatgtaccagataagagaaaagaacattttctgccgcccgtccctgatgggtaggaatgatgtattcgaatcctgttattcttgtaatggtatcttttagtttgaagaaggaggtggcaccggcataactttcatcacccagcatcatgcctgcccattggcggtcgctcatggctcccgttccggagtcggtgataagatcaatataaacttgctctgatttgagttgaaagacgttataatgtgcttctttaatccattgctcgcgttcttcgcgggtactttttctgatgggttctaccatcttgattttccatgattcagcaaaaggtaattccattgtcctcgattttagatttttatccgactaaaatactgaatatgtatgagatggacaagtttttgatgactttttgtaaggatagggatgcgtaattgtttttaaagggacatggaaagagtagatgggacggagagaaaatctagaagggaatgtgtagaatctaagagatgaggtttaaaagtcaagtttgctatcatttagtactgttatccaaagtggagtgatatgcttattagagtttctatgcaccttctttcaagtcatgcggttgattgagtggacttatgcggtcgatcgtttgtaatcgagaggttgattgaggataaaccaacggtctgtttggtgcaattgaacggtctgtttggctcaaacggagggtctgtttgtggtaattagagcctctgtttgagtcaaacaataaatacctgatttttatttttcgatgagagtaaggtcatcaatgcagaaatatttaccagtattcattccaaactcgcccgagtctgaagaactaggaataagtgtgattttagaagcatctttaagaggggttaaatcaaaccatatccatgtatttactggtttatcagtatcagttttgtaatcggcaagtttaatttttgtttcagcaatttttttccctttattgtcgtatcctgtcgcagtaacctcataccaatctccttttttgaaaggtcttgcgtaactgtcaccttccgtcataccgatgtaggcatttttactagtggttatccatagacctttaatggaatattgagagtctataattgtcatagaggctgtggtattttcatcactgtagacacctaaatatacttccccggtttttatatttccacagttgggttgacaattttggaagtggctagttttgttggtgtaagtgaagcctgcgaagctatacccttgtccccagtccgagtaataatgatcgaaggttacataactttcaggatcagtgaatgtgtctttaaaatagtatcctgaaacttcggtactagttgaagtaaattcactctccgattccgttaattggttttcgaagctgacaaccacttcttttttctcattttctcctcctttattatcatcaccaccttttacttcatcattctcatcactacatccacaaaaagcgaatactgataccagtaagaataaagataactttttcatttttgctttcatttaaattattaattgttttattgattagttctcgaaatgtaaatcctctactgtcattacttccgtggaaatttctcccatccaacctacgttttgattgacagctgtatatattttcacaaaatcaattttgtctaattctacgtgattcccgttttgatcaacagcccagtctattttgaattggctgaactccgatctgttgggatgattatccgcatatccccaaggataacagtaccctacccaagtacctccttcatttattgcattgtctttcaagcgtgttccgcgaaaagtaatttcatcttcttttatccaattgggatagtaggaatcctgttgatggtaactgttgcgatagacgaacccttctcctccttgattgtcggtccagcggatatcaccattggcaggttgaggacgataataggttatttcgtaattacgggtttccgtatctttcccatattcgcttcctgccagttcataccattcatcgtccggcaatccattgccattttcatcttttgagactaagacaatgcccggttcggcacttcctcccaaagctcccgtaccggtattctgattgtatgaggcattgcctaaaattctgaagtcatattcgcctttactattacggattgactgatggaatccgactgtaatcgttcccccgaatccacctaaagaaataacagacttcttctttaatttctctgttgcacgttccagaacctgtccggcagagaagccgtcttcgtaggcggaggttgttgtattaatgaactgtccgggggcagggatgtattcgaatactttgttggcaaaggcggaaggcgcattcggatcttccggtgtatcgcctgcctcgttctgtgaagccttgtcgctaaatactactgtattaggatttaagccgatatcatttagccgatattgaagttgcccttgttggttgaagcaaaggacatctcctttgactgtataattgtaagcctccgtgatatacacattcccgctgaaaggattcagttgaatgctgaaaggcgtttgaatagccgttccgtctgtgataaagttatcccgtatgatggttcctgcattcaggtcaaatactttgatggcggaatctttagtctgatagtcgtaagtatatagataagcgatggggccgtcgatggcaaagctcagtactttttcatcatacgtagtggcgaccgcatccgtccggctgtcgattttgaccagatgatagtctccggcttcaatgtcagttccccgtgtgactacatacacggcttcttccagccccggaagtatttttcccggattcggtccgacttctattttcttggtctccttgaaagtcgttatgtcaatcactgatactgtagtgtctacgcccggtcccgaataatccagtccgccggaattggatacatacaatttcccgttttgtacgcagatatcttccgcatttcttccgactgtgacaatctcttcgatttccagagaagtggtgtcaatccttgcgactgttccgtcataggaacatacatatgccttatccttatcaaacgctatcgcgcggggctgacgtgaactgccattgtcgcgcaacatactgatctgccggatggatttgcccgtagggaagtcaatcacctctacggtgctcgacacattgactactacataaatcttatttccatagatcgctatgtcattggctgtatctcccagtctccgctgattgtttgcactaaagtagttgttcgtacatctttgccgattgaaagaataacgagcgagcgaactattattctgattgaacagtccttcgcttaatatgtacatctccgctgttccggtttcgaatacatccccattgctttcgggtacaatacttggcttatcttccagatcatcgcaagcgataaagaagagtgggaaaagaaaaaaacacttccccaaccgtagcaacatattatataaaagacctttctgcatacctaatacttattacttaatacctattacctaatacctgactcctatcgtcactcttaccgatcttcccggcatggggaaattcttaacgatctcataattcctgttcatcagattcagcacttccaggttgagtgatgctgtaactttctgtattttgaaatctctgtaggcagagatgctgtgatcactgtagctgtccaggcggttgtcgctgatgttttgtcctaacatataccgttttccggagaaaaggaatgaataggaaagattgagccatggagtttctattccggcttgtccggaagcggagacgcgcggggtataggctatctgatgcttgtacactttaccttccggtgagttgggattggagttggtaacgtccagtgcccgttggtaagtatagtttccggaaaggttgatccgtagtttatccagaggctggaggctgaggctggcagttgcatctatccccttgatatccactttgcccagattgaccatactccagatgaataagttcttggtaggagtggctacaatcttgtcggtcactttattatggtaggcgtctacggtggccgaaagataaggtataaagttgttgatggctttactataagtaatacctatattatattgagtagcactttccggcttcagattgatgtttccggccttgtcgtaatataaatcattgaagctgggcagacggaagatatctttgtagaagaaacggaaccgcagttcttcattatgaaacggctttagcgagatgctgacattgggagacagcttccggtggttgccggcactacctccgtttttagctttctcgttgatgacagttgccagagcagaagcggacagcgtcacccattcattgacgtatttcccggcaaaggctgtcagccatgaatagcgggtgggggagacgaagttctgcaaattggcattcatcgtattgatgcttccgtcggtggacaaggagaaagaaagattgttccatatccggtatagagcggaagcggacaggtaatattcttgctggtaatagctgttgtcagttcctccgacggaggtaagagcatccgggtcctgatagttctgataactccagttccacttggcagaggtctggaatacccattttctgctaaactctttcttgtactggctttggataaaggtgttcttatcctgcagattttgtcgggagaagtcataatataaggtagtggcattgggcagcccccgtgaggactggtaataataggctttcagtctccattgctctttgtcggagagattggcgaaagcgcttatctcagcccgaaggttttctacatccgtattccggcgcttctctttactgacctgaacatcggcatcattcccgtaacgcagggtaaatggataatgcccgtccgaagacatccattcgccgttggcggtcatgctccattttttgttgagttgttgttccagaaaaagggaagggtttactaatctccatgaaccggtcttaaattcggcggctatattagtcggcttgtcttctttgaaatgcggagtcagtgtctgtatgttcagtataccggcagaagcaaaaaaacgggcaggctggaagatgttgtcgctttgtccgttgttgagcgaaaggcggtctacgttgtttaaggagaaacgtcctatgtctacttgtccggtctggcagtcgctgacggtgatgccgtcataggaaacagcggtgtgctgtgccccgagacttcggatggagacggtttttaatcctccgatacctccatagtccttcacggtaactcctgcgaaatgttttaccgcatccgatacctgcagtgcctgcagattctttaattcttccttattgaaaacctgcagaggagaggctgaacggacttcacgcgtctgataagggtcggataccatgatttcggggatggagtagatatgtgctgtatccactttttgttgttgggcaaaaagggataaggacaaagcctgacagcagagtagtacgctcatctttttaataaaagtattccttctcattgttttctttcagtctgttcataatgtaaaaagatgtccgggcgaactcacttcgaccggacatcataataaacttggcagagtttattaattagtacacactttctctgaatcagaatggtgaatgaaatgatggacggattgtccggttcattagactcatcgctttttcctcgaaagcagtgaaacgagtttgcatggtaggtcttctgacttgttcctgttgcgaacgccttcccggaatacccttccagtggctataaagtcgattgctcgcaaccaaaaaatgaacttacagcagcgggactgttcaggactttcacctgattcccttttaattgcttccctcgtgcatgagagttgcaaaccaatgcgcgacaaagatagatagtttatttgtcttttgcaagagaggagagaaggtaaatccatgactttgaacagctttttaaaaagctttgaatccaaccacctcggttgacacttcacctatcgactcgacattcttcaaaatggcactctgtactttcacaaaatgaatacgttccagcgttacaggattgccattctggtcaacggcgtcatccaggtcaaactgattataccggtagttgccgttgtcatcctttgccatgtcgcttccccagttgtcggcatatccttttccgaaatccttgtttttccatattccgccttcttgctctgtccgtgcttcgagcatacttcctttcaatgtataggagtcctctttaatccagttcggataatacatctgatcgtgatattgagggagatacttgatgactccgctttctcctttactgtcttcccaagggatatctccggctgcatccggtctgtggtaagtgacggaatagtcgcgttccggttcgtcacttcctttcagctcgtaccatacgtcgtctgcttttccgttgccattagcgtcttcggatacccatacgatgcccggttcggaacttccggagaagggattgccgataataccgaagtcgtatcctttgcggttctttatttctttcggcattttaacggtgatgtatccgccgaaagatcccagtgagacgtagagtttcttgttgaagcgctcttctgcataagcgtttgcttcttccattgtctggcagtcgaagccttcattgataaactgccctggtgccggacgatattccagcactttgaatccttgaatttccgtttcttcctcatctttgttgcaggaagccaaaagagtggctgctatagccatcagataccaatatcttttcatttttctatgttagtttagttattgaataatatttgtgaaggaacgctctcaccacagtctactgtgtggagaacttttccgtctttgctgtaaacgacgattttagattcatctttccgttcttcggtataagttacatagagttctccgctttgttggttcagctgcaatggagcagtaattgaaactcctgattctgcggcaatgaaaggtgctttgagagagtctgaatcgcctaaaatatatttatatatagctccgtcggtcgataccagataaataatattctctgtttcggatgctaccatgcctatggtcggacttgaatgatacggtcccttggccggctggaagtttgcaaagactttttctaaagtaaagtcattctttatttttacgatattacatccgttatcagccgattcaagagtataaacattaccgtctttagccagtacaaaattgattttctgtttttgaatgatatctagctctgtaacggcaggagcttctccttctttagctgcgattagctcgtttacatcgtaatacttcactttggactcatctttataagtgtcattgctcagcactttgccattgtagattatgctattatagaaacaaagcagacgctcattcttgatcctgacattgttaagtgattttaggtcaatacgacgtatgccatctcctgtcactaatccatattgttcgttcagaatggtcagaccgcttaggtttgcgcctactacagcggagttttcgtaataaagagtcttggcgtcgacaatgtagaaatgatctcggttcgatgtgctggtgcccacaagcagatagaactttccgttgctgtgaatgatatttgcagagtcgtagttaccaattcccaaagtttttcctgcatttaaagaagcataacaatcttgataagcagttttcttttcggtatcatagaaattgaatgttccgtctgctacgtagaagaatcctttggaaaagttgtggttagagctgaaacttgtgctcatttctacttttccgtatttattcttgatgatacatgacaggtccgcgcgacatggattgtctattttgtaactaaaggtcggttcggtagaatactcttttccattgaccagccatgaataggtggctccttccggattaagcagttccggagtaatctccaacgtttctcctaattccaacacttggctttctgtcgggaaagttcctttcagtacgttcggataatgtgccagattgccgaggtgcaaatcttcgcaatcgtcgtcgttacaggcggtaaaacctgctgcaaggcaggctattaataaagtggtatatagtttattcatcttgtttcagagtcttgttattagttaaaaatgaatgtagccgggaaataatagccatcgtatgctatttctgatatcttttctcctgtggcggcgttgaatcttaccagaagatttttctgatagtctccggtcaggtacatggccagtaattcgttggtctttggattgacgcggatgcctgcgccatagaatccgtaaccttctttggtgtattcggtcagtgtctcctcaggggcgggatcgtcaaaagtggctttgtatatctttcctcctgcgatgtagtagaatattccttcaggagtgccgcagaaactggcttctctgtaagcaccgaacgaggagggagaataatcgtcacgcattgcaacctttttcagagaaaaatcagcattgattcttaccagattgtttttaccgtctttggtcgtttctacagtatagatatttccatctttacattgtacaaagcgagtaccaccataggttgtaatatctaattcctggaatgcgactttgtctgtaggcttgagatcgggtgagcataattctgcaatgtctatggtatacactttaggacttccccacccggaggagttcacatttaatatgagttttccgttataagcgattccgctacctgttccggtatacgtatttcctaccgataccagtgtaattgtttcaaacgtttttaaattgatacggctgaaatatcctccatgagtaattattccataatcgtcattcaaaccgataaactcataagcttgataattagctagtttgccacagctattttcagcatacagagttttagggtccatcaccactaactgattatcttcttttgaacagacatacaacttcccattccacaaagtagccgattgtgaggtaactcccagcacatctccgaaattctgattcttatagcaccagtgttcaatgctgttcttctcataattatagaatgaaatacttccggatccgtgtccgaaccatccctcattgataatcagacatcctttggagtaatccgctcccggaaccatcactttattttctaatgtcacttttcccaagtcattgctgagttctaaaataactttggaacggccgggatgttcggcgttgaatgtgaatgacgggtctgtcgacatatcttctccattctgataccattgatagtatatatccagcggactacttgccttaggggcatatacatattgttctccgacattgagtgtcaaatcctcttcggggaaagtgccggttttcagagctggtaatccttgtagtttgtcaatgtgctccaggtcacaatcgtctttcgagcaagacacaataacgaacgctgttattataaataataacgttttgaatagctttttacaattcatgttttgtatattaagtaaataaaatatgtccatcaaagtgtccgggcgaaatcgcttcgaccggacacacataataaacttggcagagtctattagtttgtacatactttctctgaatcagagtgatgaatgaaatgatagacggatgtccgggtcattagattcaacgctttttcctcgaaagcagtgaaacggattttacatggcaggtcttctgacttattcctgttgcgggcgccttcccggaattttctttccagtggctttgagtagattgctcgcaacatatctatggaacttacagcagcgggactgttcaggatttacacctgattcccttttaatcgcttccctcgtgatgagagtcgcaaaccaatgcggggacaaagatatatagtttatttgtttctaccaaaaagaaaataacagcagttttgctctcatgctctaacaattcctgcgtatccctttattcatcgctgtttcaagcgtggtagcaagtgtggtggcaggtatgagagcaaacggttgctctcactccggtgcatcggatgacgtgacgttttgtagtgttataggttgatttgtaggatgttaacgtctgatacgtcaactattaaagattgacatatcaactattaataattgagaaatcaggtattaaaggctgataactcatctattagtagccaataaatgagttaatgcttcttgaaagaacgggtgaattggagcaactgatacggttgggttactccggtcatgcagtcaagttactctaattgatagttgctttagaaagttccaaagcgttgaaaccaacggtttcaagcggatgaaactctagtttcaagcagaggaaactttagtttcaaactgaagaaactttggtttcaagccgatgaaactttagttccgagcggcagaaacattttgtttcaacggttggaactgatattggaactacatgttaactattgatgctgcattagatatgcttcaatggctggtgcggtggcatctttaagcaatacagtcttgtctttatccaacagatatagagtcgggatagcctttaagtcatagacctgttcttctttgatagtgaacttcttgtcatatccgttaatccattcgttgggaaattcgctcagatgctttttccactcgtccagttcctcatcggggtagatggagagaagtaccaacttcttttcctgtaaaagctggttgatgatgggagcgtttttcagaccttctatggtttctgtgcatgcctgacagccggggttattgataaataacagaagatattccgctttcaactgatataatgaaccttgtgctccggaggccagggtataagtgaagttgagcgctttggttccgatacgatttttctgagccagcttaagacgggcctggggacgtatcttctctgtttcgttcaatacaggagaggctatcattgcttccagtaccggtatataaaattcttcgttgcgcatgggggagttgggatcatacagatacttgtctgccaggtcggtgatatatgtaaacaccttcttgtccacattggtccggtcgattacattgcgcatggcttgttgggctgtttcaagcggtacgtggttcagcaagtcgcaataatctgcccacgcttgttccgttacttccggatggtggatatagttggtgtcggcaaagtttacattgtcccaataatgcttggccagaaagtcggcccgttgttccggtgctgtcatcatttgcgggatggcgggcatcttaatagccttaatggtatcttgcggtgtttcgcttttgttttgacttgaagcattcccgtttttacaggcgccaagaagaaggcacagaatgagtataaggcttatgtttgttttcatgacaattggttggtttaaacttactttcgaaagcaaaggtatgaaaactatgtgaaaaaacataccgatattccggtaagttttgaaaactggatatgcggcttcgtattttttatcgatacagccgactttgtgtgaatagggctaaataatctcttcccttcgggtggaatctgcatcgaatttgttatctttgcccgtagcattggttattttttaataaaagctgatatgaacgcacctgttaaaacgctccgtaagctcccgatagggatacaaagtttcgaatttcttcgctcggaaggatatctttatgtcgataaaacagaactggtctatcgtctcgtaacgaaagggaagccttatttcctcagtcgtccccggcgtttcgggaagagcctgttgctttccacgcttgaagcttatttcaaggggaagaaagaacttttcgaaggactcgctatcgagaaattggagcagaactggttcgaatacccggtgttgcacctaagcttgaatgctgagaaatatgacagtagggaacgattggaaggaatgcttgaactgcaactggaaagttgggaagagatgtatggagtagataaaggcacaatgacctactccggacgcttcattaccattatccgacgtgcatacgaacagaccggacgccgtgtggtcgtactcgtagacgaatatgacaaacccatgcttcagacattcgataaacctgatttgcaagaagacttccgtaaaacgctgaccgctttctatactgtactcaaagatgctgacccttatcttcagtttgtctttatcaccggagtaacgaagtttgcgcagatgggcattttcagcacgcttaaccagttgaatgatatcagcttcgaccttgagtacaacaccctttgcggcatgacacgtacggaaatcgaaaccgtttttgtacctgaattgcaagaactagctctccaggctgaaacaaattatgacgaagctatagagcaactcacccgccagtatgacggttaccgcttcactcctgagaaaggatttactcccatgttcaatcctttcagtgtgctcaatgcccttgctaagtcgcgtttcggtgactattggtttgccagcggaacgcctacttttctggtagagatcctaaagaagacaaattttgaccttcgcgaattggacggtattgaagtctcttctgcttcattgagtgacgacagggcgaatatctccaatcctgttccgatgatttatcaaagcggatacctgactataaagtcgttcgaccaacgttttcgtacatatacgctggggtttcctaacgaagaggtgaaatatggtttcctcaattttgtcgcccctttctatactcctgtcgcatccaccgataccaccttttatatcgggaaatttgtgcatgaactggaaacgggcgaaacggaagctttcctcactcgtctgtcctgtttcttcgccgattttccttacgaactgaacgagaaaactgaacgtcattatcaagttgtattctatctcgtcttcaaactcatggggcaattcacgcaagcggaagtccgtaccgctatcggtcgtgccgacgcagtagtaaagactgcggactacatctatgtgttcgaatttaaactcaccggcaccgccgaagaagctctgaagcagattgatgaaaaaggttaccttttgccctacaccgtggatggcaggcgactggtgaaagtcggtgtgtcttttgatgccgcgaaacggaatctgggagagtggctgattgtttgactgcactgtgaataaagaaaaaccaagctgtttatttctctttcgccagcgtgaagacaaattccagtccgccgccttgattattcttggcagaaatgtttcctccgtggatgatgacggcattctttacgatggcaagccctaaaccggttccgccgagtttgcgtgaacgccctttgtccacccggtagaaacgttcgaaaaggcggttcagatgttccggagagacaccgatgcccgtatctgcgaagctgaaataatagtagttctcatcttcacggaaacagttgatgtttatctgaatattggttccggcgtatgcgatggcattgtccatcaggttgcggaagatggagtagagcagggagtaattgcctttgatctggatacccttctttagtgaatccacgatgctgatgtgcttttcttccagttccagagaaacttcattgatgatgtttcctaccagtacgctgatgtctacccgttccatgtctatcatgttggcggcttcgtccatgcgggtcagtacggatatgtcgcgtagcagccggctgaggcggttgctctgtgcgtaacaccgttcgaggaacgtatttatcttgtcacgtgagatattctcgttgttgacaatcgtttccagataaccttggatactgcttacgggagttttcagttcatgggcaatgttctgggttaattggcgcttcagacgtacctgctcttcttcctgcgtgacgtcattgatcgaaatctcgaagctggcatcctgaaagatgatacattccacgataaaggtgcgtccgtttttgttgattgtgacggacatacgcttttcgtcttttccccgcgagcgttgctgctggttcttgttgatgaaatgaatgatgtctttcagttcgctgatggcgaatacttcctctgtcgtttccaggttagagtccgaaatcaggttactgtattgagtaaagaggttgttgaccagaatctcttttttgtctttggtgaatatgcccagcccttcatgcgaaatctgaagatgggtaatcagtttctcgcgttcgatgtagagtgcctctttcgtttcgtgcagacgcttgtatatctggatgatgtgctgcgaaatctctcccagctcattatgcggaaaagcggactgcatcgccatctctatcggttcgttacggtctgcacgcatggcaaactcgcggagctggctgatagaggttcccagtttgttggtgaatttgtagaagatcaccatgagcaacagcgacacaatgaccgtaaaccataagtaatgcgggtctgcctgcagattattgatgaggcttacattatatggcagtgccgagcggatgatataatctccgtagcgggttgccgaatagaaatacggtagcccggtggtctccgaggtgcggcgtacgtcaaaaccggttccgtctttcaaggctttctgaacttcggggcggttgagatggttctccagttgctggtcggtagtctgataactgtcatagatcacatttccctgcaagtcgatcagtgtgacgcgcaagtcctccaatgcgtggtcgcggatatacttttcagtcgtttcttcgatggcgggattactgttcagccgttcgtacaagcggctgttatagttctggagctgtgtgttgagtaactcgactttatattctctttcgcgttgatactggtaggcgatgaaacaaaaggcaaataccagaaacagcgagatcaccgaaaggaataacttccggctgaaagagaggaaatgtttttgcttgacaggtagattcatacttcttgattattcggcttcaaagcagtatccgtatcccaggcgggtaacgatgcacttgccatattcgccaattttcttccgtaaacgggtgatattcacatcaatggtacgatcgagtacgtatacttcgtcgctccagatgcgtgccagaatgtcttcacgggagaagacgcgtcctttgttctgcaccagcagaagcagtatttcaaattctttcttcgtcaactgcacttcttcgtcatctatgcttaccttcttcttggtgatgtcgatcacgagtgactggtaagtcaggcgttcgggcgccttttccgtctccatcgtggcggtacgcctcagtacggctttcacacgggcgatcacttcgcgcagggagaaaggcttggagatataatcgtccgctcccagattgaagcctgttacagtatcgttttcggtatctttggctgtgatgaagatgatgggcactctggctgttttcttgtctttcttcagcatgtttgccatcttgaaaccggagatttcccccatcatcacgtccagaagaatcaggtggtaactgctgatatccatcttcagagcctcttcggcggagttggcggtatccacttcataaccttcgttttcaagattgaatttcagaatctcacagaggtcttcttcatcgtcgacaactaaaatacggtaatcgttcatatgatatatgtattaatgtgatatgacaaagttaagcttttttttatttcgggacaaagatgagaagactttgttacgggcggatgaaacaaatattacaatcgtattacattccgctgaatgcgggcatcgggatgatatttgaaagtttttatgggatatgcgaggaaaaaccgtctgttatttgttatctttgtgtagcgataggataataaatacacagtttgcagatcatgataaaaatagacttgaaacgatatagacgcgaagtggtaggaggggtgattgtactgcttcttctcatcgggggaatctccgtttttaaatatacttcttttaattccggctttgagatcgtagacgatttgggaggaaatatctttccgtcggccatcctgtcggtagccactacggacgcgcaggtgattactccttcagattctacctgtctcggaaatccgaaatcgtgcatcgccgttcgggtgaagtcaaggactgcttacagccgggtgcggatagaggttgccgaaacccctttcttttcccgttccgtgtcggaatttgtgctgaacaagccgaggacggaatatactatttatcccgatatcatctggaattacgaggcactgaagaataacgcacaggcggaaccggtgagcgtagccgtaaaagtggagatgaacgggaaagacttgggacaacgggtacgtacgttttcggtgcgtagcgtcaatgaatgcctgttgggttatgtggcgaacgggacgaagttttacgataccagtatcttttttgccgcatacgtcaacgaagagaatccgatgatcgaccagctgcttcgtgaagcgctgaatacccgcatcgtgaatcgtttcctgggctaccagagcacggccaaaggtgcggtagacaagcaggtgtacgcactttggaacatcttacagaaacgtaagttccgctacagttccgtatccaatacgagcctttcgagcaatgtcgttttctcgcaacgcgtccgcacctttgacgatgcgctggaatcgtcgcagatcaactgtgtggacggcagcgtactgttcgcttcgctccttcgggctatcaatatcgaaccgatactggtacgtacaccggggcatatgttcgtaggatactacaccgacaactctcataaggacatgaacttcctcgaaacgacgatgatcggtgatgtagacctcgacgacttcttcccggatgaacaactggactctaccatggtcggcaaatcgcagaacgaaatgtcactcctcactttcgagaaatccaaacagtacgccaacaaaaagtacaaagacaatgaagcaggcatccattccggaaagctgaactatatgtttctggagatttccaaagaagtacggaggaaaatacagccgataggaaagtgaaattcatttttaattcgtatttttgcccaagtaatcatttaatgaaaaaggatgcaaggcaagaaatttatctcccccggagcatggttttcgatgaattatccgtcggactggaacgagtttgaagatggcgaaggctcttttcttttctataaccccgatgtatggacgggcaactttcgtatatcagcttttaaaggcaacgcctcatacggtaaagatgccatccgtcaggaactgaaagaaaacgattcggcttcattggtgaaaatcggtacatgggactgtgcctacagtaaagaaatgtttcaggaagagggcacttattatacttctcacctgtggataacaggaaccggcaatatcgcttttgaatgttctttcaccgtacccaaaggcggaagcgccaaggaagcggaagaggtcatcgctacactggaagcccgcaaggaaggcgagaaatatcccgcagaactgattcccgtccgcctatcggaaatctatcagatcaatgaaggctacgagtgggtagtatctaccgtcaaacaggaactcaaaaaagactttcagggagtggaagaggacttggagaagattcagcaagtgatagacagcggtaagatcagccccaagaagaaagatgaatggctcgccatcggtataacggtatgcgcgattctgactaacgaagtggaaggcatggagtggaaaaccttgattgacggcaatcgggaagtccccgtactcgaataccaaggccggactatcgacccgatgaaaatcgcatggagcaaagttaaggccggccaaccctgcaacattgccgaagcatatcaatcggcaatcgatcatcactaaatcacgaaccagctaatcactaaattacgtggcagtaccttatttacaagtagacaacctgaccaagtccttcggcgacttggttctttttgaaaatatatcttttggcattgccgaggggcaacgcgtcggattaatcgccaagaacggcagcggaaaaacaaccttactgaatatcatcaccggaaaagaagggtatgacagcggaaacatcgtcttccgccgtgaccttcgtgtggattatctggaacaagacccgcagtatcccgaagaactgaccgttctcgaagcctgtttccatcacggcaacagcaccgtcgaactgattaaagagtacgaacgatgtatggaaaccgaagggcatccgggactggaagacctcttggcacgcatggaccaggagaaagcatgggaatatgagcagaaagccaagcaaattctgtcccaactgaaaatccgtaactttgaccagcaggtgaagcaactttccggcggacagctgaaacgtgtagccttagccaacgccctgatcaccgaaccggatttgctgattctcgatgagcctaccaaccatctggacctggacatgaccgaatggttggaagactacctgcgtcgcaccaacctgagcctgctgatggtgacgcacgaccgttatttcctcgatcgtgtctgctcggagattatcgaaattgacaatcagcagatttatcaatataaaggtaactacagctattatctggagaaacgtcaggaacgcatcgaggctaaaagcgtggaaatagaacgtgccaacaatctctatcgtacggaactcgactggatgcgccggatgccgcaggcacgcggacacaaagcccgataccgtgaagatgccttctatgaactggagaaggttgccaagcaacgtttcaacaatgacaacgtaaaactggaagtaaaggcctcttatatcggaagcaagatattcgaagccgatcatctgttcaagagctacggcgacctgaagattttggatgatttttcctatatctttgcccgttacgagaagatgggaattgtaggaaacaacggaacgggtaaatctacttttatcaaaatattgatgggacaggtcaaacccgacagcggaatggtggatgtgggcgaaactgtccgtttcggctattactcgcaggacggccttcagttcgacgaacaaatgaaggtgattgatgtcgtgcaggatatagctgaagtgatcgaactggggaatggaaagaaactgacggcttcgcaattcctgcagcatttcctgtttactcccgaaacgcagcatagctatgtctataaactgagtgggggagagcgccgccgcctttacctgtgcacggtgctgatgcgcaatcccaacttcctcgtgctcgatgagcctaccaacgacctggacatcatcactctgaatgtgctcgaagagtatctgcagaacttcaagggctgtgtcatagtcgtttcccacgaccgctactttatggataaggtagtagaccatctgatggtattcaacggacagggagatatccgtgacttccccggaaactatagcgattaccgtgactggaaagaagccaaggcacagaaagaaaaggaagcggaaaagccgcaggaagagaagaccgcccgtgtccgtctgaacgataagcggaaaatgagcttcaaggaaaagcgtgagttcgaacaactggaaaaagaaatagcggaactggaagcggagaaggcacagattgaagaactgctttgcagcggaacgctttctgtagacgaactgactgaaaagtcgaaacgtctgcccgaagtgaatgatctgattgacgaaaagaccatgcgctggctggaactgagcgagatagaaggctgacatgaatctgaacggaaagaaactgtaataactgaaacaacctgataataaccgaaataacatagaccgatatgacaaacctgaccaattaccatagtcactgcttatattgtgacggacgagctaatatggaagattttatccgttttgccattagtgaaggcttttcttcttatggtatttcttctcacgctcctctgccattttctacagcatggacgatggagtgggaccggatggatgattacctttccgaattttctcgtctgaaggggaaatatgccgataaaatagagcttgccatcggactcgaaatagactatctgaatgaagagagccatcccgctatccctcgttttcaggaattgccgctcgattatcggattggttctgtgcacatgctctattctccgcagggcaaagtcgtggatatcgatacccctgccgatatattccgtcaattgatagatacgcattttgaaggtgatctcgattacgttgtccacctttattataagaatctgctccgtatggtcgagctgggaggttttgatatccttggtcatgcagataagatgcactataatgcctcttgctatcgtccgggattattggacgaaccgtggtatgatgcgttggttcgcgattattttgcagaaatagcccgtcatggatatatcgttgaaattaataccaagtcttatcatgatttgggaactttctatccgaacgaacgctatttccctttattgaaagaattgggtattcgggtacaggtgaatagtgatgcccattatccggaacggattaataacagtcgtgccgaagcattggcagccttgaagaaagtcggctttgacacagtagtggagtggcacggcggacagtggaaagatatgcctctgttacaataaaacagagcttctgtttataataaatgcaggctccgtcaactgctgacagagcctgcatttatctataacagagcctctgtttcgatcccctattccgtccttttgcaggcattcgataacaggaactcattcaaagcttcttcataattcccatgaatcataatatgatgattgcctagcgggtttttcaggaaataatccgctggagtattcatgcggatacgcacctgcgtgcggcacatattgatataattcgtattctcggttagagttccggtagacaggtaatactcatccagacattcgcctccgcattttacgatagtcacgtcacctgtcgggagcagtccttgaatggcgatacctttctctgtctcaaaatgattgcggataatatatctttccgtctgtttgagtcctatagtgcaatgtgccagtattaattcattggttcgcgtattgatggtggatggatttgccatgaatccttcttttcctgtcagcgccttaactgccagaagagtgaagatagactggagatctccctcacagcctgccatgataccgtcatcattcagcaatgacaatgccagacagccggtcgtatcaatttgatcgatcagtttgaagcagcttaatgtcagtgcttccagcttctcttctttgcaaattctcttgatggccctgtataatcgcatcgctttgattaaatcctcaggagttccctcgcggcaggcaagcgcctgcgaagcaacggcggcgcaggacgcgcctacctgatcatcagtgatttgtttaaaatgttcataaaccctttccagcggaatatctatatattcgattccccagcggcgctttgccagaagataatccacattgctggcaaccagccacgaagaaggagtaccgatgactccgatacgcttgccgaacaaagaacgctgcgcgcggaaattattatatagtatatgtacacgttgaataatagacggtaattctccatgaagaatttcactcttcattccccttccacggagccatgtagatatttccaatgccgcagcaagtgagttctgcatgccatcggccaataaaatggcggggcggggaagacgttcgaagtgctggatgaccagtctttccacacctccggtagcgataaaaatgattttgaaatcatcactgcccaacttatccatatcttgataatcgatgagtttgacagtgtaatatttttcaagttcactcagaattgcttcgtgcgaattgcgcagcgaggcttgtttgtgaagtattgaagcaaatgagataaggtgtatggtcattatgatattgttttaagttttccgtattacaaatgtatagctttcttttcatttttccactacgtttttacccttgataaggattttaaagtttttatgtctctgtattcaaattattgcgtacatttgcagttccaaattaaaaaagtaaatagtaattagtaatttgtagttaaaattatgccaaccatatccattcgcggaaacgagatgcctgcatctcctatcagaaaactggctcctttggcagacgctgccaagcaacggggagtccatgtgtttcacctgaatatcggacagcctgacctgcccactcctcaggccgcgattgacgcgatacgcaacatcgaccgtaaagtgctggaatatagccccagtgccggaaacagaagctatcgcgagaaacttgtgggatattatgcaaagttcaacatcaacctgacggctgacgatataatcattacatcgggaggttcggaagcggtacttttttccttcctttcctgcctgaatccgggagatgaaatcattgttccggaacctgcatacgccaactacatggcatttgccatctctgccggagcaaagatccgtacgattgcaacgaccattgaagaaggtttctccctgccgaaagtagagaaattcgaagaactgatcaatgaacgtaccaaggctatcctgatttgtaatccgaacaacccgaccggttatctgtatacacgtcgggaaatgaatcagatccgtgacctggtgaagaagtacgacctcttcctcttctctgacgaagtatatcgtgaatttatttataccggctctccttatatctctgcctgtcatctggaaggtatcgagaataatgtagtgctgatcgattcagtttccaagcgttattcggagtgcggaatccgtatcggtgcattgattaccaagaacaaagagatacgtgacgctgttatgaaattctgccaggctcgtttgagtcctcctttgatcggacagattgccgctgaggcttctttggatgctccggaagaatattcgcgtgagacgtatgatgaatacgtagaacggcgtaaatgcttgattgatggattgaaccgtattccgggcgtttattctccgattccgatgggggctttctataccgtagccaaactccccgtagacgactcggacaagttctgtgcatggtgtctttctgactttgaatacgaaggccagaccgtatttatggcaccggcttccggtttctatactactccgggctccggcatcaatgaagtgcgtatcgcctacgtattgaagaaagaagatttgacccgtgcgcttttcatcctgcaaaaggcgttggaggcgtatccgggaagaacggaataggtattaagtaataagtattaagtaataggtaataaccgtagacgctgattggcgtatgatgtattataaggttgataattatatcataaggtgatgtcttaatgcttaatataatacttaatccctaatccctgatctctaaataagctacggctattacttattacctaatacttaatacctattaaagaattgtcgttatctctttttatagcccgtcgtatttatcgcgagagcgatggtggaaaacaggtttcacgtcctgcggtcctcattgctatggctggtattgccatagggttggctgttatgattattgcggtggcggtagtcatagggtttaaaagtgaggtaaggaataaagtcatcggattcgggtcgcacattcagatagcgaatctggatgtggtcaattcttatgagactcatccgattgcggtgggggacagtatgatgactgctctttccggttatccccaagtaagccatgtgcaacgttattctaccaagccggggatgataaaaacggatgatgcttttcagggaatggtactgaaaggtgtcggaccggagtttgatccgagttttatgcaggagtatctggtggaaggggagattcctgcgttcagcgattcggcttccagtaatcaggtacttatctccaaggcgctggctactaaaatgaagctgaagctgggagataagatatatacctattatattcaggataatatccgtgcccggcgcttgacgattgcaggcatctatcagaccaatttctcggagtatgataatctgtttctgctgactgacctttatttggtgaaccgtctgaatggctgggaaccggagcaggtgagcggagtggagctgcaggtgcgcgactatgataaactggaagatatcacttacgagatagccgttgatacggatagccagcgtgataagtttggaggcgtgtattatgtacgcaatatagagcaactgaatccccagatatttgaatggctcaatctgcttgatctgaatgtatgggtaatccttttcctgatgataggagttgccggctttaccatgatttccggtttgctgattattatcatagaacgcaccaatatgatcggaatactgaaagcgctgggagccgataattttacgattcgcaagactttcctttggtttgccgtctttctcatcggcaaggggatgctttggggcaatgcgattggactggcattctgttttatccagtcccaattcggaatatttaagctcgatccggagaattattatgttgatacggtatcggtttctttcaatgtctggttcttccttttgatcaatgcaggtacgttgctggcatcggttctgatgctgatcggaccttcttacttgataacgaagatcaatcctgcaagctccatgcggtacgagtaatcttctctttttcttttctttttttgctgcaaaaataatttagaccgtagcgtgatgtagagtgaataatatgtctatatttgcgcccgatttacttaatatcctcttgtaggtttaatttttaaccattatgaataatgtgttaattctgttggataatccggatgactggaagccgtattgtgagacgaaaagtatcctgactgtttccgactatctgaagaacaagccggttgaaaaagaccggaagttagttattaatcttagcaatgattacagctataactccgaagggtattactgttcgttgcttgcccagacgagaggacaacgggtgattcccgatgttgacatcatcaacaaactggagacggggacaggaatccgcatggaccgaagtctgcaggcgttgtgttatcaatggattcagaagaacgggatcaaaagtgatatctggtatctgaatatctatttcgggaaatgccgtgagaaagggctggaaagagtggcccgcttcattttcgagaactatccctgccctttgttgagagtcgctctgaacactcatcccaagaatcagattgaaagtattcagttcttgcctttgaaccggttggatgatgaggaacaggacttctttgccaatacgctggataactttaataagaaaatatggcgtgcgcctaagtcggcaaaagctcccagatatagtttggcggtactgatcgatccgaaagagaaattcccgcccagtaacaaaggggctttgcataaactctccgaggtggccaagaagatgaatatccacgttgaaatgattacagaggatgatgcgatgcgtctgttggaatttgatgcgctgtttatccggacaacgacatcgctgaatcattatacattccatttgtcacagttggccgcccagaatgggatggtcgtcattgatgatccgttgtctatcattcggtgtaccaataaggtttatctgaaagaactttttgagaaagaaaggattccggcaccgaagtctacgttgatttttcagtccaatgagaactcgttcgagcagatcagtgagcaggttggtgctcctttcatcctgaagataccggacggttcctattccattggcatgaaaaaggtgtccaatgaagaagaactgaaaacaagtcttgaacttcttttcgagaagtcggctatcttgttggcgcaggcatttacgcctacggagtttgactggcgtgtcggtctgctgaacggagtacctttgtatgcctgcaagtattatatggcaaaaggtcattggcagatttactgccattatgattcgggcaggagccgctgcggactggtggatacgattcctatctatcaggtgccgcgtgtggtactggatacggcgataaaggctgccaatctcatcggaaaaggcttgtatggagtggatttgaagatggtcgatgataaggcttacgtgattgaaatcaacgataatccgagtatcgaccatgaactggaagatgcgattatcggtgacgaaatgtattaccgtctgttgaatcactttgagcaggcgctggaaatgaaacattattaatgatggaaccaacgatacacctccgtcaggcaaaagtgggagacattcctgccattctggagatagagcaggaatgttttcaggaagatagtttttcgagagaacagtttgtttatctgatctgccgttcaaagggcaccttttatgtggtggtggaacaggagcggatgatcgcctatgtctcattattgtttcatgcgggaacccgttatctgcggatatattcgatagccgtccatccggactgcagaggaaggaagctgggacagttgctcatggagcggacgattgagacagcttttgactgtagggcggtaaagattacgctcgaagtaaaagagtcgaatacgcctgccatcaagctatatatgaaaaatggctttattcccgtgggagtaaagccaaactattatcatgatggttcggatgcgatttatatgcagcggcacatgtaatcagcagttgcctatcttctcataaagtcccctttcctgcgtaaggagcggtaaagtttgaatttgagcgactggatgggctggaggatatcgaaaaccggcagggagaaataatatttcctgtctccgcccatttctttggctgtccgattaatgatgattgcctgtacggtatagcggaacagccagatcagtaatgcaattccggcagccagccaatggttgttgaggatgccgaatacaagacccgcgatgcaggcagcgtaaaacagcagacgggagaaagtctcgaatcctaacaaatagcgctgtacaccgtgataaaagcgtgcggttgccatatagcttatcttttcttctttccattctttgtagctgtataccggttgtatccgcatagttgcattgatatccgtttctacgcgtgtgttggatggggtggctatctggttgatgaataaatcatcttccccgcgttgcaggttcagataagtggaatagccttttctctggaagaataattctttccggtaagccatattgcggccgatgcccatgtatggctttcctgccaatgcaaagcataaataacgcagagactggaataacgtgtcaaaggctacccgtttgtgcagccatcctttggtccggtcgtaaccgctgtatcccagcactacctgagtctgtgaagtgaagttacgtgccattagtctgagccaatccttgcttgcaggcatacagtttgtttctgtaaataccagccagtcgtgtttgctggccttgatgcccaatgtcagggcaagtttcttatgactgatgtagcgtgcgctgtcgggagtgaagctgtgatagaggtgaggatatttctcttccataaatcccagtacatcctctgtctcatccgtagaagcatcgttgataacaatcacttcgaactgcggatagtcttgttcgagaatggcaggtaagattttacgtaggttatcagcttcgttgcgtgcacaaagaatcacggaaagcggaggcatctcttgtgtgaaatgcactgcttctttgcgtacagccttattgcgggcatgtatccgattgtacaagccgaaataataaatgagctgaatgataaaaagaatacctgccgccgataaaagaatcagttcgacagtattgaatgtaaatgcttccattggatataagtgtcgtttttacgactgcaaaagtacgcatttttttggtagctccgtcatctcgcaggaaggttatttcgtaaatccagatattctttcttgaacatgtcgacgaatagaaagaataatgaaagcagcaacggaccgaagatgactcccataaatccgaacaacggcaaaccgataacgactccgaatatcgtaatcagcggatgggtatccgccattttcttctgcaggatgaatcggatcaggttatccgactgagatatgactattccaccgtatgcggcgagtccgatagcgttgaaccagtctccggttacggcaagataggcagctacgggaaaccatatcaaggcagttcctaccattggaatgatggtggcgaagcaggtcaggaatcccaataccaggacattgggtgctccgaagataagataccctatcatggcgacccctccttgaataatggctaacagaggtatgccgatggcattggaacgtacaatcatattgatttcgtgaattacttcctgtgtattcgcttcattgaacgggagaatgtcattcacataagcttccatcttttttcctcctatcagcataaagtatagtacgaataccatgacaaacagattgatggcaaggctgctgatgctttccattattatttgtccgatgcggggtaggatggagacaatgaatgacaaggtatcttttcccagcacatcataacccgttttttctttgataaactctgccacctgctgcatcggggcaatgaatgtttgcgggtccagattgatgtcctgaagttggtttaccagtagccagattgtcagtccgagcggaaccaaaaataccataaccgtctctgccgtaatcagcaatgcggcaacactgcgtttcagtttccacttttccgtcaggtgcgtcatttgtgtgcgtaccaaaatataaatagtgagtgctcccagcaatcctcccaaaaaaggagtgatctgacggaagatgatgattcccataaatagtatgatgacgatgagggaatatttccagtattgttctttgatgctcatattatgtatttagatattctgctttataaacaaaagaacagtggaaaaagtttgaatgtccggtatgaggtttacgtatgttgtttttaagggagctcaatatgaaaaaccgtttttccggctctgctttctttgatagccaaatgcccttcgtggcggcggataatttctttgcacaggcttagtccgatgcctgtaccttctgatttagtcgtaaaaaaggggatgaatactttgtccataatttcgggaggaataccgggaccattgtcggtgatgtctatgactatatgttcgtcttgttctgcttgcagggaaagctctccatgcggatgcccctccaatgcctgcatggcgtttttcaacagattgagaaacacttgtgacagttgcttttcgtctccttcggtcatcatcggttcgggggagcaccggagtgtaaaggagatattgttttcttgaaaattggtttgaagcagttcctccagattgtgtaataagtcggatagggaaaagagacgcttttcgggctgcggaagataggacagatgccggaaagattcggtaaattccatcagccgttcgctttgcgcctgaataatgtgaagcccgcggattcctttctcgctgatttccggataggaagccagtgtctgagacagtgagataatgggagcgatcgtgttcatgatctcatgagtcaggacatgactgagtttgctccatgattcactttcgttttcgttgagccggtcgtcaatgtcttgtatggaaagcaaggtgattgtttcgtcttgtagtttcatctgactttgggagaggctgagcctttttctgttcttctcattctgcaggatattttccagttgggaatatagagtcagtgattcgatgtttagtaaggtcaacgctgtgttgttgacgaagattattttcttggagttgttccaggctatgattccgttgggtactttctccagcagagaccggtagaaatgttcctgtttctggtagtccattttggtttgtgccaatagggcgttgatccggttcagtgaacggttcagctgttgttgctcttcgtttattccttgctcggggtagctgaatgtattatctctgtcctcgatggcatcaaagaaaagccggagtttccggttgatgttattgagataagtgactattccgccgatttgaaacaaggagcagatgattagtaacgtaccgatgatgatgccacgttgggagatgatgagccacagccctgttcccgaagttgcgaggatgagcaggatacgaagcaatatggtccaatagatatgtcggctgaatatcatcttgttcagggtttgaatcgtttcagtttattatagagagtttgtcggctgatgcctaattgttcggcggcggctgtcagatttccattgttttggaggattgctgtttcgatggcttgccgttctacttcctccagattggggacgacgcttgccgtctgaggtttccagctttgctttaccagaatatctttggggcgtatcacgttgccttcgcataagatcaccgctttttcgatggcgtgttgcagttcgcggatattgcccggccagtgataggagcgtagtttctcaatcgtttgctcgtgcatccgtatgtccggccgttgatatttggaagtaaaacgacggaggaaagtatctatgaataataggatatcgtctccccgttcccttaaaggagggatttccagatgaatggtgttgatacggtagaacaaatcttcccgaaacagtccttgctttaccatttccggaatatctttattggtagcagagatcagccggatatcaacgggaatcactttgttacttccgattcgggtgacattccggttctgtagtacagtcaatagtttggcttgcagtgcaatggaaaggtttccgatttcgtccataaagagggaactgccgttggccgcttcgaattttcccggacgactttcgtatgcgtcggtaaacgctccgcgttcgtgtccgaacagttcactttcgaagagtgattcactgatagcgcccatatcaatgccaagcatttgacgggaatttcggggagataaacgatgtatctctttggctaacatctcttttcctgttccgttctctcctgtgatcaggatgttggcgtcggttttggctactttcgtgaccactttaatcaactggagcattgcgggagagtggccgatcaacatttccggtttgctcggtttctcggtatccccctgtttgccggttgcctttgaagcgcttttggctttgctgttgttacttttataagcctcctttatcttccgaatcagaatctgattatcccaaggtttgagtaaaaaatcagtagccccgttttttagtgcttttaccgccaattcaacgtctccgtaagcagtcagcataaccaccggtaaagatgggcggatttcgtggatttgttttaaccagtacagtccttcattgccattgtttatgccggcagagaaattcatgtcaaggataacgacgtcgatagaggtggtagtcagtaacgtggtgatttgattgggattggcggtggtgcgaactgtaccgaactcattttcgagcagtaactccagtgaagctaacacgcttttattatcatctactattaaaatagttccgttttccatatctaagattgggggtatctatcaggttgaaccatgctttaagtttgggggtaaagatattcgtttttgctttcctctgcaagcgagtgtccaataattagacgttttcgggcatatttactgcaaggcttacttaaatgcccgaaaattgctcccgaagaatatgaaataatggataacgtccaaaagttggacgttgcggtgtgtaataattggacggatgcaatgcaatcgtattggtcatttagttaataatcaattacttaaaaattgtggcatcctatttgccttctaatcatcgtaacacacaatcgcatatattataaagaatgaaaaactttttctttttgtccttattcttattaccgcattttgtgcaggcccagtccggcatgactttggatgagtgcattcgtctggcatggaagcagaatccttctgtgtggaacagtgtgatagatataaaggaggcacgggcagattatatggctgctgtcggtgcttttcttccccgtgcagcggttaatgcagaaacagggaaacgctttgggcgttctatcgatccggatacgaacggatataccaacgaaacttttgaagaagggactgtggggcttgatatgactctttctctttttgaaggcttttcacgcattcatcaggtacgcttccggaagatgaataaggaacgtagcgaatgggcactgaaaaataagcagaatgaactggcatatcaagtgacggatgcttattataaactgattctggagagaaaactgctgaatcttgctttagaacaaagccggttgagtgagcggtatctgaaacaaaccgaagcctttgttgagttgggattgaaatccgcttccgatttgcaggaagtcaaggcccgcagagaaggggatatctatcgttataaatctcgtgagaatacttgccggttggccttattgcatctggaacagctaatgaatttccaacccggtgatacactcgttattcaggatactattgtggaagcgaatcagttgcccttgctttctgttccgtctacggaaacactttatgcccaatcactggaaatacttcccgtcatgcgtatgattgatttgaaacgaaaggctgcccgtaaagagtatgcgatggctggcggaactttttctccttctgtctatgcccgctttacggttggttccaatttttacaatacggttttttctgccagacagttgcgggacaatataggaaaatatgtcggcatcggtatttcgtttcctttgctgagcggattggaacgtctgactcatcaacggaagcagaaactaaacctgtatcgcctgaagaatgaagaagaactggaaaagcagcagctatataccgatatagagcaaacacttctttccctgcatgcgggatttagtgaacatcaacaggcattgcaacagcttgacgcagaagctctcgtactgaaagagtccgaacgtaaatgggaggaagggctcatttccgtctttcagctgatggaagcccgtaaccgttttatcgccgccaaggcagaactggttcgtgtacgcctgcaagtggaaatgatgaggaaactggagaaatactatcgggaggggactttcctgtaaaacggagtctgtgccatcggatcaatcatttaataacaaccctattttgaatatacctttatggatacacctgttgaacgcaaacccggcataaatcgcaaacacctttatacgatcggtggtgtggcgctgggaatcgctgtcattttatattttgtttttagagatacggcttcctccatgacagttgagaaagaccgtctcacgattgctaccgtcaggcaagcggagttcaatgattatatccgtgtgatcgggcaagtgatgcccagccggattatctatatggatgccatagaaggcggtcgtgtggaagaacgtctgaaagaagaaggagctatggtgaaagcgggcgatgtgattctgcgtctcagcaacccgttgctgaatatcggaatcatgcagagtgaggcagaccttgcctatcaggaaaatgaattgcgcaatacccgcatcagtatggagcaggagcgtctgcaactgaaacaggaacgcataggcttgaataaagaacttacattgaaaaaacgccgttatgaacaatacagacgtttggtggaggagcaactgattgcccgcgaggatttccgtcaggcagaggaggagtatgaagctgccaaagaacaactggcggtcattgacgaacgtatccgtcaggacaatattttccgtgaaagccagatcagcagtctggacgagaacatacgcaacatgaaacgcagtcttacgttggtccgtgagcgcttggaaaacctgaagattaaagctccgattgacggacaggtaggaaacttgaacgcgcaggtcggacagtccatttccgcaggagaacatatcggccagattattactccggacctcaaagtacaggcacagatagacgagcattatgtggagcgtgtacttcccggacttcctgccgactttacccgtgacggaggaacctataaactggaagtaaccaaaccttatccggaagtgaaagaagggcagttccgtactgacctggctttcatttcggagcggccggagaatatacgtgccggacaaacttatcatatcaaccttcagttaggagacccggcacaagcgatccttgttccccgtggcggattctttcaaattaccggagggcggtggatgtatattgtcgatgaaagtggtaaatttgccacgcggcgtcctgtgaagatcgggcgccagaatccacagtattatgaggtgacggaaggtttgtcttcgggtgagaaagtaatcatatccggttatgagttgttcggagacaatgagaaactaatactaaaataaataaaaagaatcaccatgattaaaacagaaaaactgtctatgcttttcactacggaagaggtgcagacgaaagcattgaacgaagtcaccttacacgtagaacaaggagaatttgtcgctataatgggaccttccggatgcggcaagtcaacgttgctgaatattttgggcacgttggattctcccacttccggctcttatttctttgaagggaaacaggtggataaaatgaacgagaaccagctgactgcccttcggaagaataatctgggctttatcttccagagtttcaacctgattgacgaactgacggtatacgaaaatgtggaactcccgcttgtctatatggggattaagactgcccaacgcaaagagaaagtgaacaaagtgctggagaaagtaaatctgctacatcgtgccaaccattatcctcaacagttgtcgggcggacaacagcaacgtgtggccattgtccgtgcggtagtgacggactgtaagttgttgctggctgacgaaccgaccggaaatctggattcggtgaatggcgtggaagtgatggagctgttgagcgaactgaaccgccaggggactacgattatcattgtcacccactctcaaagggatgcgacgtatgcgcatcggattatccggttgttggacggacagattgtatccgaaaacatcaaccgtccgttagaaaaaagtacgtcctctaaaaacgaagctgtatgataggaaattattggaatagtgcctatcggaatctgatgaagcggaagaagttcagcttcattaatgtgtttggactggcgatcggcatggcatcggcgttactgattctgacgtatgtaacttttgagttcagttttgacaagatgcacacgaaatatccccatatttaccgtgtgcaaagtacattccgcgaaggggaggtgctgaccgataactgggcaagcagctctttcggatacggctcggcaatgaaagagaatcttgcgggaattgaagattatacccgaatcggctctctgctccaacctgaacagattgtgaagtatggtgagttgacgctgcgggaaaaccagatagcttatgccgatccgggctttttccgtcttttcgatttcgagcttctgaaaggtgataaaaagaccagcctttcgatgccgggacaagtcgtaatcaccgagcgcattgcccgcaaatatttcaaagaggaagaccctgtcggaaagattcttatctttaccggtccctattataagatatcgtgtgaagtgaccggagtcatggaggaaatgccttccaattcccatatacattataacttcctgatttcgtatacatctttgcccaagtttatacatgaatactggtataagcatgaagcatatacgtatgttctgctcgattcgccggagagggaagcggaaatagaaagagagtttcccgtcatggcggaaaagtacaagacggaggaagcgttgaaaaacaaaacatggggagtcgatttggttcctctggcagatatacatctcactccgcaattgggttatgaaatggagacaaaaggaaatcgttctgccatgattgcacttgtctttgcagccattgccattctggctattgcctggataaactatatcaatctgacagtagcccgttcgatggagcgtgccagggaagtcggagtgcgtcgggtagtgggtgctttccgtaagcagttgattcatcagttcctgttcgaagcgctggttatgaatctgattgctttcatattggcggtagggctgatagagctgattcttccgtactttaatcaactggtgggacgtacggtcactttctccgtttggctgatggattattggtgggtgctgctggctcttgtttttatcgcagggatattcctttccggatattatccggcattggctttgctgaaccgtaaaccgattaccctgttgaaaggaaagtttttgcatagcaagtccggagaacggactcgtcaggtgttggttatcattcaatatacggcctctatgatactgctttgtggaacattgatcgtgtttgcacagctgaattttatgcgcagccaatcattaggggtgaaaaccgaccagacattagtcattaaatttcccggacgtacagacggcctgaatgtgaaactggaagcgatgaagaaagcgataatgcggttgccactggtgcatagtgtcgcagcttccggtgctgtgccgggcgaggaggtggctactttcctttccaatcgccgtaccaatgacgctttgaagcagaaccggctttatgagatgctggcctgcgatccggattatatagaggcatatggtttgcaagtgatagccggacggggcttttcagaagagtacggagacgatgtagataaactggtgattaatgagacggccgtacgcaatctgggctttgcttccaatgatgaggcgataggagagttggtaacagtagaatgtaccgatgctccgatgcagattatcggagtggtcaaagattatcatcagcaggcgttgagtaagaattatactcctattatgctgattcataaagataagatagactggttgccacaacgctatatttctatcgtaatgacttccggcaatccacgcgaactggtatcgcaggtacaggaaatatggaatcggtactttgctgattccagtttcgattattttttcctcgatcagttcttcgaccatcagtatcgtcaggatgaagtattcggggtgatgataggttctttcaccggattagcgatattcatatcctgtctgggactttgggtattggtgatgttttcctgttccacccgtacgaaagagatgggtatacgtaaagtcttgggagcttcccgctggaatcttttctatcagttggtcaaaggatttttcctgctgattctgatagcggttgtgattgctcttccggtagcttggttcagtatgaacgcctggttgagtcattatgctttccggacggatttagaagcctggttctttattgtgcccgtattgttgatgttgttcatttcattcgtgacggtggcctttcagacaatgaaaataataatgagcaaacctgctcgttcgttaagatatgaatagtttttagattactccttcgggcattcgttaatatccggaggaattatgttaaatgttaacaagtctgctacttctattaaaccatgttataagatgcttcgctttgctccggaaatttggagatatgcagaaagtccgtatctttgtagtgtgtttttcatagtattagatttaaggttaacaaaaagattggctgtctgggatagatagcctttttttatgcccttttttcgtatatttgagggacataaaactagcatgaatattatgaggacaatcttgttaactctgttactttctgttgcggcaatatcgtcatttgcccagacaaatacttatcgggagtgtacaagtcagaattttaaaataatctcatatacacgggagctttctccccaaggatgccagcaatctccgatatatgtgaagcccaagcgttcgtaatacgaagtatgactggtgcttaaatataatttcgagaatccggatttcagtgtatccttcttggcttgttctattaaaagattggcgtaatgatttcccctatacttttcttcaatgaataaggcaaccaaccaaggatataaatccgcacgagagttaaaatcgttgctggtaagtcccgcacatcctattatttcatcaccattcattaaaaggtaccattgaggaatgggattttcggcattcagagaatgtctgaaacaattgtcatacaccattttcgtgttctcgttaccccacttgctttggaaataggcgatagctctttccagatactgaggtgagtctctgagtgaaactagattcatacgtttattgtattgtttatatttaatattgccaaagttataaaagtatttttgaaaaccaataggttgcctgttttatctgactaattctgtatatttgcaagtatgtcctgcttattaaataatatcataatatatatggagaataaagaattgcgtgaaagaatgctttcgggaaaaatgtataatgacttgtctgtagaactggttcaaagaagagaacaggctgttttcctgaccaatgattataattccacttatggaaagcctaaagaagttcgggaggcattgttacgtaaactattgaggtgtattggcagtagtgttcattttgaaccgaatttccggtgtgagtttggattcaatatcagtatcggcaataatttcttcgccaattttgattgcatcatgttggacggaaatctcattacgataggcgtcaatgtattattagggccccgtgtcggtttatatacggccaatcatgcgctcgatccgcaggaacgtcttatgggcgggtgctatgcccatccgattgtcattgaagataatgtatgggtaggtgccggcgttcatataatgggtggtgtcactgtcgggagaaattcagtaatcggtgcgggcagtgtggtgacaaagagcattccggagaatgtaattgccgcaggtgttccctgtaaagttattcgggaaataaccgatgaagacaagaccggttttctgccttagtgttttacggatgaactagctcgctacttactgaaatttaaggatcgtttcacaatcctttgtcccgcaatatgcgaaagattattcgtctgacaactgttgaactttcgtctgacagctgtttctttttcgtctaacaactgtcagacgaaagttcaacagttgtcagacgaatacttttatgtaatttcaatactagagtttagcaaagtcgtccataagtttccttgattttgtcctaactatattccttttgtttattgctgattaccataatttgcaatctatccattccagtttgtcgaatagccataattcaaaaaagaacaagataaatgggaggataatgatgaaggtcatagtcactccactacttttcgagtgtcggtaatgattgataatagctttttttctgtctttacggtaacgaaaaaatatgaaaatgtaaggcaataaaagaatcagtacttgataaaatatgaccgcattgtctccaaagtgatgggttacactcgtgaatccaaatgccggaaaagctacgatcattatccaatactccagtaaaatgaatgcaccggagcatctgaaggctttcttgctccattgttcacccttaaaatacagataatcgaagaaataatatctgtatttgggaggatgtaatctttgttttacgcgttcgaaataattatctgttttattcgtaccttttttcatttaattgattaataggaattacatattacaacttactcgacgtatttagtaagtctctctgtttaaaaaagaattgagccatttttgagagaattctttttgctcacgagtattcggaaattcctgaatctctgcataatcaaatatcgttgcgatatctttttttaatgcaggttttccaagagtcaggatatataccttattggagacactcatcattcccgattgatgagcatttattattatggggtgtataccttatttatatcatactttttcatacatttgtttgttttggatcactgataatggctaagcggggaacgctgtaagcgttatcctgcttcgttaataacttttttctgttgtgaattattaagacgttgaactaacatcttcttgaactctgtactattacattcatttataagttctctatattcaagagattttatttctgaatacacagactctattaaatgtagtaatgtccattctatcccatataaagcagtcggtggaaagagcttgattaaaatatgtgcttcatccaaagtgacaggtttaactatcttgcctaataagtctgcatattcatcaactaatgcagccgttattcgttcatctgcttcatcgggcattgcacccattaaagctaattgttcaacttcttttctcataacaatgttgttactaatgaataaataatcacactcgacgagtagaggttatttcagtaaccgatactataaggcgaggttactgaattctattttctaattcgatatatgctactgacaaagttatgaaactattaatgaaaaacaatctagcgtccattttattttatttacatgacagacattgtgataatatgtatatattagccattcactgaaaaaatgaccttttcttaaaaagaggatatttacacaggcactaaagaccgtaattacatatcacttatcaaggagaatagaatatctccgtcatttgtaaatacgaaattctatctttatgtaattggaagtgttcttagagtaaaatggtaaccatttcctgttaatacttatcatttagatggattaattaaggaaggtactccgttctgtcattttctattttatcggtatttatgatgaactagagaaaaaacgagcaaaaacagcctttttataacttcctcactgatgaaaaacaagttcattagtaagggacggagcgttggttttaaaggaacacctcgttcctttaaaaccaaagagtactgaatgactaaaaaaagatgcatatttcatacagtattatgcaggatgaactcgtattcctgcatattattgcactaatttatgcaggatatgctgtcgttcatgactttttgagcaaattcctattggcataatattaaatttggaacatttagactgaaaggacatttatcttatcaattccacatcttgtctacaaatgaggcgtgttcgtctcatttgaaaaaccagcaatgtagtatcccttatcttcgtgtcgaaataaaaaacagaataagtcatgaagatgaataaaactatgttgttaggggaagtagcaaaccgttcggggattccggcagatgaatgcggagtagtacttaaaacttttgaaagagtcctttgcgaagaactcacacggaaactgtaccgttatggaggatggatattgctgttgatcggtttgtttatatcagcctttgctttcgggcaaatatcggatcggaaagggcgtccggtccagaccattcgtgggatggttgttgacggagattccaaatatcctataccgtatgcgacagttagattgtcagataaagaggggatggggacgacaaccgacagtttgggacgtttcaccattccgcaggttcccgtcgggagacatacggtagaggcagcgttcatgggatatgaacccggcattttcagagaaatactggtgacttccgccaaagaagtctatttggaaatacctttgaaagaaagcgtcaacgaactaagtgaagtagtggtccgtgcgcggacgaacaaagaagaagcgatgaataagatggcaactaccggagcacgtatgctgagcgtggaggaagcgagccgttatgcaggcggattcgacgaccctgcacgtctggtttccgcttttgccggagtggcgcccagcgtctcttcgaatggaatttcgattcatggcaatgcaccccatctgttgcaatggaggctggaggatgtagaaatcccgaatccgaatcactttgcggatattgccaccttgggtggaggaatcctttcttcccttagctcacaggtacttggaaattccgatttcttcaccggagcttttccggctgaatatggaaatgcagtgtccggcgtgttcgacatgaagttgcgcaacggtaacaatcaaaagaacgaaaacacgatccaagtgggaatcatgggaattgacgttgcttccgaaggtcctttgagcaagaagcataaagcctcgtatatctttaattatcgttattctaccacaggattactgaatcttgacggtggaacgatggactatcaggacctgaacttcaaactgaactttcccacaaagatggccgggattttctcggtatggggaaccagcctgattgacaaatttaagagtgacatggagaggaaccctgagaaatgggaatatctgggcgaccgcagcgaatcacgtgacaagcagtatatggctgccggaggtatcagtcaccgttactttttcaatagtgacgcatcgctgaaaacaaccgttgccgctacctactcgcagttggacggaggcgcttccatgttcaatcatgcgttggaatcgactccttatatggaccttgaatcaaggcataccaacctgatactgaccagcaccttcaaccgtaaattcagtaaccgctttaccaataagacaggattcacttatactgccatgttttatgacatgaaccttgccatagctccatacgaagctcagctgctggaaacggtatcgaagggagatggcaatacgagtctgatttctgcttacaatagttcttctgtcggactgagtgaccgttggactctcaacgccggtatctacggacaatacctgacgctgaataataaatggtctgtcgaaccccgtgccggactgaaatggcaggctaccccaaaagcgacctttgctttagcttacggcatatacagccggatggagaaaatggacgtctactttgtgaaaacgaagagcacgggaaatcaatccgtcaataagaacctcaacttcaccaaggcgcagcacatcatgttgtctttcggctacaagatttcggaccgcatgaatctgaaaatagaaccatatgtacagttcctgcacgatgtaccggtaatggcggacagttcctattccgtactcaaccgctccgacttttatgtagaagatgcgcttgtcaacaaaggaagaggccggaatatcgggattgacataaccctcgaacgcttcctggaaaaaggactttattacatgatctccggttcgttgttcgactcccgttaccgtggcggagacggtgtatggtacaacacgaagttcaaccgcaactatgtcatcaacggactgatcggcaaggagtggatgttgggacgcaacaaacagaatattcttagcatcaacctgaaactgaccttgcagggcggcgaccgctattccccgattgacatggaagcaaccatgaagcatccggacaaggaagtgcagtacgacgaaaggaaggcattctccaaacagtattcgcccatgttgatcggcaattataccgtcagctaccgcatcaacaagaaaaaagtatctcatgaatttgctgtgaagggcttgaattttatgggcacgaaagagcactacggacatgagtataacgtgaaaaccggaaagatagatgcaaccgacggctctaccgtcctgactaatgtgagttataagcttgaattttagatatccggtatagagaccataacggaaaatgttttatcttcgtacccaatgaagcatatggcaactgaaacaactgcagcaggcaacgaatcggcctttttatatagattgctcgtaagtccggcattccgatggatgcggtatctgatacttgtcatggtgttgggtactatctccttcaatcaggtcttcatcatttttatggactatcgggatatactgggcgtatggatttatgtgttcacgtttatatatatgctcacatacgttggcgttatttgtctgaaccttttctggttattcccgaaatatttgttgaaaaggcattatatgacctatctgtcggtgctgtctgtggcaatggtcattgcgctgctgatacagatggtcatagaataccttgcttactcccattggccgcagcttcatgcgcggggatcgtatttctcggttcccatgctgatggactacatttcttcttttatgctgtcaacgctttgcatgataggaggaacgatgactttgcttctgaaagaatggatgattgagaatcagcgtgtttcacagatggaaaaggcgcacgtactgtccgaagtggaacagctcaaagagcaggtcagccccgaacttcttttcaaaacgttgcatcattcgggtgaactgacattgaccgagccggaaaaggcttcgaagatgttgatgaagctgagccagttgctgcgctatcagttatatgattgcagccggcaaaaagtattgctcagcagtgaaatcgccttccttaccaactatctgacattggagcaaagctcccttccgcaattccgctatcagtttacttcggaaggggaggtaaacaggatgctggttcctcctctgctcttcattccttttgtgcagcatatcatggagttgacgcacgaacagcagatatcgattcctgtctctttggacatccatctgaaagcggagaagggtacgattgtattcacttgtatgtgtccgcaacttaatctctccgtaaacaggggactggaacggatcagacaaaggctggacttattgtatggcgaccgctacggactatcttttaccatggaatgtataagactggaactgaatggaggggaataatgagaataagtacaaacgataaaaatacgctcgacaggaatcccggtgacggaaccatgaacagcagcagtgtcaccgcttttctgctgagtcctcattgcaggatatacagacatatcctcttgcaggtggctgttctgctgattacaatcaatgttttttggtacgagcctttgcaggtggtctctctcttgaaacgctttggaggctgtctggtctatttcttgtctatgaatgcggtgatatataccaatctgtatgtcctggttccttcttttctgctaaagaaccgtttgggtggttatgttctggctgcgatagttaccaacttagtggtcatccttttcctttcagttacgcagggaatgctttttgaagttattttgcctgtcaggaatcccgatggatttgccactttcatcaacaccttttcggggatactcactatgggctttgtcaccgcaggttcggcagctatttcattgttcactcattggctgcgtcataatctgcgcattgatcagctggaatctactactttgcaatcggaactgaagttccttaagagccagattaatccgcactttctgttcaatatgctgaacaacgccaatgtactgataaagcggaatccggaagaagcttccaaagttcttttcaaactggaagatttgctgcggtaccagataaatgacagttcgcgcgaaagggttgctttagcctcggatatccgttttctgaacgattatctgaatctggaaaagatacgccgggatcattttcagtttacaatggagcaggaaggggacattgactccatctggattcagccgttattgtttatcccgtttgtggagaacgcggtaaagcatagttttgatagcgaacatccttcgtatgtacatctttcttttaaggtagaagagaaccggttggagttccgttgtgaaaatacgatgccggcggttgctgtcagcaacaaggtaggaggaatcgggcttgcgaatattcagcgtagattaggattgttatatcccgaccgttatgaattggagcagatagagaatgaaaatcggtatatggtaactttatgtataacgttatgaattgtattattgtagacgatgaaccattggcacgggaggctatgaaattgctgatagaggaggcggaatgtcttcagctggtgggaagttttaacagtgccgccacggcttccgactttatggagcagcacgtagtagaccttgtctttctggatattcaaatgcccggcattacgggaattgagtttgcccgtaccatttccaaacggacattggtaatctttaccactgcctatacggagtatgcactggatagctacgaagtggacgcaattgattatctgataaagccggtggaggcggagcgctttcagaaggcggttgagaaggcgcagtcttatcattctttattattacaggaggaaaaggaagccattgagacgattgtggctgccgagtatttctttgtaaaggcggaacgcagatacttcaaggtcaacttctctgatatcctttttgtagaaggtttgaaagattatgtaattctacagttgggcgaacaacgcatcatcacccgtatgagtctgaaagcggtctttgacttgttgccgaaggactcttttttacgggtcaataaatcgtatatagttaatacagcccatatcgattcgttcgacaacaatgatatatttatcaagtcgtacgagattgctatcgggaatagctatcgggatgacttctttgaaggcttcgtgatgaaacaacaaagatggtgacaggtcttgcgatgttttttatgtcatatatatccgttagtctttaatctgatgcaatattggtagataaaggaaagtttataaaagaatctgccctctgtcagtcattagaatgctgatagagggtagttgcatatcaagaaaaaatcgaaattagtttatttagcttcgttattctgtttcaaaagaaattcgtcgattgctttcttcaactggtctttgggcaaagccccttgcgtgattctcggttcttctttcatcggaatcagtaacagggtggggatactgcggataccgaatgcggcagccagttccttttcctggtccacatcaatctgatagatgtctaccttaccgctgtattctttgctcagttcttccagaacaggatgcagcgctttacacggtccgcaccatgttgcatagaaatcgacgattgccggacgtttgccttcaaatttccaatcattcggattggcttcaaaatcatataccttctttaaaaactctgctttatttaatgatactacttccattttattgtcctcctttgttggttcattactctttttattttctccgccatttcccgcacaagctgtggtggccagtacgatagcgaaagcgctcataatgcttttaatcagtttcataaatcttttcggtttatttgtttctatgttgcaaaggtaaggcgaaatagcttcccgtgaaatagcgatttgactggaacacttggcaaaatttcccatcactgctcctttaacgctaaaaaatgtctttttatctttggaagtaataaaaatatgcactacttttgtcgcgataaaatgagtattcaccctttaaaatgatggaaagggtattaattatgttggagctataatattttcaaattaggactaagttgtctcgtcgggaagacggggctttgcgacattttgttttttacgtttaccgcaactctgctgctggcggtaatagttgattagtcctgcaatcacattttttatttttcaaattattcacttcaatgctgtggatggatgttttatatccgtatccgaagcattggcataccgtgtataaccttactttccgctgttgaggcggacggggtgtggtatgcgaacagaaaaaaagtatgggaatacgattaaaagatttaagtaaactgggatatcgggataatgtagcccgtagtctggtagtagacattgtaggcaaatattgcaaacatgacacgaaggaacagattgcaatgactttgagcaatatactcgaacatcccgaatcttataaaaacaatgaaatatggagtaagctggcggaacgcctgtcgcctactgttcttgcgaaagagttcgtagcttacgacttacgggaagatccgttgatgtataaaacctatggaggtaagtttatcgagactcttgccaaacaacagatgaatttggctatgcgcctgcctgtaacggtcggcggagcgttgatgcccgatgcgcacgccggttatggattgcctatcggtggggtactggctactgataatgccgtgataccgtatgctgtcggggttgatatcggttgccggatgagtctgacggtatttgatgcgaaagcagacttcctgaaacgatattcttatcagataaaggaagctttgaaagactttacacatttcggaatggatggcggcctgggctttgaacaggagcatgaagtgctggatcgggaagaatttcggttgactcctttattaaaggatttgcagggaaaggccgtgcggcaactcggaagctccggaggtgggaatcactttgtggagttcggcgaaattgctttgcaggcggataatgtgctgaatcttccggaggggagttatgttgctttgctgtctcattccggttcacgtggcttgggtgctgctattgccaaacattacagtctgttggcccgtgaagtctgcaaacttcctcgggaggcgcagcattttgcgtggctgagtctggactccgaagaagggcaggagtattggatgagtatgaatctggcaggagactatgcccgtgcctgtcacgagcgtattcacttgaatctgtctaaagcattgggactgaaacctgttgcgaatgtcaacaaccatcacaactttgcgtggaaagaggagatagttccgggacgtatggcgattgtgcatcgcaaaggggcaactcctgcacaaaaaggacaggcgggtctgattcccggaagtatggctacggcaggttatctggtttgtggcaaaggggtggaagaatccttgtgctctgctcctcatggagccggaagagcgatgtcccggcaaaaagcaaaggagagtttcactcagtcggctttgaaaaagatgctgtcgcaggcagacgtgacattgataggcggaagtatcgaggaaatgcctctggcatataaagacatcgatcgggtgatgtacacgcaggagactttggtggaagtgcagggtagatttatgcctcgcatcgtacgaatgaataaagaataaggcgatgaaggagaaagtctatttacagataacttccggcaggggacctgcggaatgttgccgggtggtggcattggtactcgaaagaatagtaagacaggcgcaggcaagcggactgaaagtggaaatgatagaacgtgaagtgggaccggtcaaccggacactgctttcggctaccattgctcttcaaggcacagcgagcggagaactggcggatgaatgggagggaacggtgcaatggattgcccaaagcccgtatcgcatttatcacaagcggaaaaactggtttgtcggtgtgcattcgtttgtgttgtcggagagtcaggaggctacagaaagagatttccgctatgaaaccttacgggcttccggtccgggcgggcagcatgtcaacaagacagagtccgcggtccgtgccgttcacatcccgtccgggatgagtgtggtagcttccgaccaacgttcacaatggcagaacaagaagctggcaacggaacgcctgttggtgaaactttcgtcatggacgatggaacaggcgatgattcaggcgcaggaaaactggagtaatcataatcatcttcaacgggggaatcccgtgaaggtgattcgggaaccgctgatttagctgtgagtaataaaaaatatataaagtgactaaaaagtcggttctatctcccattcccctcccttcgggaaggaagggtggctgaaagtcggggtggtaggtggatgcatagattgatgataatcaaagttatatgcttacctaccacctccccctgcggggactcctccttcccgaaggaggagagtttgaggttactaccgactttttagttcgcctttatgtatgcaggataatgtcactatatcaaggcgatagtgtcattatcctgttattattctttcgggtggttaactgaaaatataaacgataattcctgtaatcaccacatatgccagtgcatacgggatagcagctttcagtatttccccttcctttccctgctggtttccagcagaagtcgcaatggcgatactttgcggagaaataatcttaccgcctgtcgcacctaccgtatttgcagctgacagccagtccggactgacatgaatctgtcctgccacacttgcctgtaactttccgaaaaggatgttggaggaggtatcacttcctgtaataaatgtccccaggcagccgatgaccggagcaaacagcggatacaagcttccggtagcagtagccagtgccgtagcgatgacagcaatcattcccgaagtatccataatggtggataaccccacgagacagatcacggtaataaaggttttctttaattgcttcaccgtattccaaagaacgataaacagctctttgactttggcaccctgtatcaacccaccgataaaagtaccgaggaagagtagtacacctgcatgggtcaaccacgagattgtatagtttacggtagtagcattgacaggcagactgattcttgtaacccagttattctccaatgtacttctcaaactcgggaaaagcggactggtgaggatgatcaggaacaaaatcagtaaatagatgctccacgcattcagtatatctttggttttcagcgtacttttccgaggcttttcttctttcgatgcggtcagttttccatagagaacgatgacaatgatagaaagaatacttccgataatggcaggcgattctgcccccatatatctggcagccagatattgtccgaccaaagaaacacctccgaccagcagggccagaaatatattcttcgggagtgctttcagtttaggattggtgaggaaaagcaagaccagcggaatcagaaacatgagtaccgataattgcaatacaacgttcgtactgagttgtagcacatccagattcgtttcctttgccaacaccaataccggagttccgatagcaccgaaagccgtagcgacactgttggctatcagactgacagtcgccgaaaatatcggcttgaatcccagactgataagaatcgccgccggaatagcaaccgccgttccgaatcctgccatcgcttccagtaatcctccgaatccccaagtcagcagcaatacctgaatgcttttatccgtagagatggaggcgaactgttgcttgataatctccatcttttccgttttcagcaatacgttataactgaaaatagccatcagaatgatgattaaaataggagagaccgctttcagcgctccatataaaaaggaataaaacagattgtctacagaaaaggcgaaaccgaaaagagcgatcagcatggttacaatcaacgagataatactgctcttgtcaccggacatcttgaagaacgccatcaatacaattaatagtaataccggaataatagcaaggattagtgtcataattctaaattttaaatagtcaacttctggtgaatatttaatataacaaaacaaaaggtagttttgatggatatgtgactctaattttatccaacttcttttggtgaatgtgtcaaaaatatatttaggcacggatttcacagattaacacggttttaagagttaagtaacccaaaaccgtgaaatccgtgtaatccgtgcctgaaaaatcgttttaagtgacttccgtcccttctgctacttcttgctcattttcatattcatgatctgttgcaactgtttcaagtttgcctgagcagcttcattccctaatttggcagcttgttcaaaggctgctgtagcacgttgaatatctccgtttaagaagttatacacgcctgtattattcagaaattcggcagtggtatgatccgctttttccatatatttcaatgcggtattgatatccttctgtgacagggcgacagccgctgcattcagattggctacggcatcggccggatacatacgtacggcaatatcaaatacatctacaaagtccttgctgcctttcggataactattggctacctgatacatctcgttcagactcagatatttcggattttcacggatgatgatacgtccttgttccacatcgaagttgaccactgtgtagtcgattttgcagtttactttacgcagtcccggataaatctctttcagcatagtgcgataaggagcgccgccgccgactttcatgatttcctgtttacgtttcacgtcattcgttgtatttttgatgatattcaggaaggtttccttatccttcatcgaagaggattcgagagctttcaccagtccgtcccagttctctccgccgaaagtcactttatacagtttggcagatgccttttcgttcttgaccagataatctttcagagcttccgcacgttttttagagagttgctcgttgaaagccagcggtccttcgggggaagcgaatccttcgatgctgatgctttgtacggtcagattcttgtcattctggattttatcaaacatagaatgaatattcaccagttcggagtgattgttcatgaagtcggtaaggatgacagacttgttgacggggaagtccagatgagcttcgtattgctcactgcggtttttcaccacttccaccgtaggctggatgtaggctacgataggagacatggcactcagtcgtttggcttcggtagatacgtcgttcgttatcagttcctgcgcgttcatttcctgatagttgccgcatccgcacaggttctctacaagttgcagggaagcatttgccatccacggctgataaggaatgacctgcgtataattaaacgtttctcttttgttataaggtacgatgatagccgtgggttcctgcttgctgatcgccagtccgcgtagataggctttctcgcgtcttttgccgttgacgataatctcctgtagcgggacattatgttgtccgtccgtcagcagcgggatcaggctgaggctgcgtgccgagccgatggtcaggtttgccatgtcgaccgtcatgccgatataaagcgagtttccttgttgccataaggatacattcgagagcgtgagtgcatcattcagaaatttctgtgcatgagccggaagtatggtggctgcaagagctataaatagatagataagttttcttttcatcattgtaagttttaaaaagttcgattatttgatgacataaatgaagctgaggccgattttggtagggccgaaatagttgcgggtgttgtgcccgagtttttcgcctccgtcaccgcgggcatatttatcatatttcagacgggcgtaaccgactccgatggttgcttccatgctccagcgtttgctgatgatccactggtatccgtaagagatgccggctccgtacagactgccgtcatagcggtcgtgccccattccgaatatgttcagattgctgacattcatttctccgtagtgtccgtgcagaccgaagaaacttccgttgaaacgttcgcagagccagtagcgcaattccggttgtacgagccagtgcttgatctggcggtcgtcgccaaacttccacggattgtagttgccggatacatcgagggtgattttctttgccagtccgacttcgaatcccaggttgggagtgctcgtagcccagtagagggcattggtcttgatggcgaatttgggtagataggtttcattccgttgtacttgcgcatacgcgcttgtacccaatacgagcaggaaaccggctgctaataaaagtttaattgttctcatttttgttagggtctaggttttattaaaatgatatgcgataaacacatgattgtgtgactttgttgtgtaaacccgtagaaaagattccttgcccgtatccgccataaagatgtttaagggcataaatgctaacaaattcggcaaatgatacgtttactatataaaaatacctttgtgtaatcaatatgacaactaattaatttattactgactatttttacacataacattaatacaaacagcctatgaaagagcttatcaagaatctggaagaactgaacaggaaagcagaaaaaggtggcggggatgcccgtattgagaaacagcactctgtgggcaagctgaccgcccgtgaacgcattgacttacttctggaaaaggggtcgtttatcgaacttgataaactggtgacccaccggtgtaccgacttcggtatggaaaaacagaaattctccggtgacggggtagtgactggttacggaatgatcggcaaacggctggtctatgtttttgcacaggactttaccgtattcggaggggctctttcggagacacacgccaagaagatttgcaaagtgatggacatggcgatgcagatgggagcgcctattatcggactcaatgattccggtggtgcgcgcattcaggaaggcgtccgttctttggcagggtatgcagagattttccttcgcaattccatggcttcgggagtcattccgcagatcagtgccatcatgggcccgtgtgccggtggtgccgtttattctcctgcactgaccgattttattctgatggtcaagaactccggctatatgtttattaccggaccggacgtagtcaagagtgtgacacaggaagaagtaagcaaggaagatctgggtggagtgggcattcacatgacaaagtccggcgttgcgcatctgtcggccgaaaatgatattgaatgtatcaattacatccgcgaacttatttcttatctgccgggcaacaatatggaagagcctcctttcgttgtcaccaacgactcgccgacccgcttgacacccgaactgtccgacttggtgcctaccaatccgaatcaaccttataatataaaggagatgatagaagcggtggccgacgataataacttttttgaacttcaggcagaatttgccgcgaacattgtcaccggatatatccgtctgaacggaaagacgattggggtggtagccaatcagccgctggtgctggcagggacgctggacatcaatgcctctataaaggctgcccgcttcgtccgcttctgcgatgctttcaatatacctctgctgactctggtcgatgttccgggattccttccgggagtagatcaggaatatggcggaatcatccgtaacggcgcgaagttgctttatgcttactgcgaagctaccgtgccgaaagtgaccgttatcacccgtaaggcttacggaggcgcttatgatgtgatgagttccaagcatatccgtggcgatgtcaatctggctttccccacagccgaaatcgctgtgatgggaccggacggggcagtaaatatcctgttcaagaaagagatcgaaaagtcacagactcccgaagaaaggcgaaaggaacttcagagcgattatcgtgaaaagtttgccaacccttaccgcgcggcggaactgggctatgtggatgaagtgatcgatccggccgttacccgtctgcgtctgatacgcagtttcgaaatgctggccaacaaacgtcagtccaatccgcctaagaaacactctaacattccactttaataaatggaaaatggaaagttgaaagttgaaaatggagagtgatcaattaaaagaaacagattatgataaagaaaatattagttgctaatcgtggagagatagccatgcgcatcttccgtacttgccgggtgatgaatatttcgacggtggctgtttacacgcatgtagacaggggggctttgcacgttcgctatgcggaggaggcttattgcatctccaattcgccggaggatacttcttatttgaagccggggttgatactggccattgccaaaaagaccggagccgccattcatccgggatatgggttcttgtcggagaatgccgactttgcccgtcgttgcgaagaagaaggagtgatctttatcggtcccggtgccgatattatagctaagatggggatcaagactgaggcacgcaaaatcatgcgtgaagcggggctgcccatcgttcccggaacggaaactcccgtgcaggggatcgaagaagtgaagaaggttgctaaggaagtaggttatcctattatgttgaaagcgcttgccggaggaggcggaaaggggatgcgtctggtccgttccgaagaagaagcggagacggctcttcgtctgtctcagtccgaggcgggtacttctttcggtaatgatgcggtctatatagagaaatatatcgagaatccgcaccatatcgaggtgcagattatgggagataaatatggcaatgtggttcatctgggcgagcgtgaatgttccattcagcgacgtaatcagaaggtgatcgaggagtctccgtcaccgtttgtgaaagacgaaacccgtaagaagatgctgaaagtagccgtagaggcttgcaagcggatcggttattacagtgccggcacgctggagttcatgatggataaagaccagaacttctatttccttgaaatgaatacccgtttgcaggtagagcatccggtgacggaggaatgtaccggcgtcgatctggtgcgtgacatgatcacggtggctgcgggcaatccgttgccgtataagcaggaagatataaaattcagcggagctgccatcgaatgccgtatctacgccgaagatccggagaataactttatgccttctcccggagtgataactgttcgtgaagctcccgaaggccgtaacctccgtctggacagtgccgcctatgccggattcgaagtttccctgcattatgatccgatgattgccaagctctgctgctgggggcgtacccgtgaatccgccatctccaacatggcacgtgccttgcgtgagtataagattctgggcatcaagacgacgattcctttccatcagcgtgtgttgaagaatgccgctttcctcgaaggaaaatatgatacgactttcatcgacacccgttttgacaaggaagacttgaagcgtcggcagaataccgacccgactgttgccgtgatcgctgccgccgtcaggcattacgagcgggagaaagaagctgcctcccgtgccaccacgctccctgtagtgggcgaatctctctggaagtattatggcaagttgcagatgactgctaataattattgaataagttgagagttgaaaattgaaagttaagttggtcattcattaaaattagaaagatatgggtacatcgttagcgacttattatgccaagcttctggatatgctggacagtgaatataaggtggagattctggaagacggaccgatcaagaaaatagcggtcaacggtaaaatatatgaggtcgattacaatatgggaggcgactccattcattcgatcatcattgatcatcactcgcatggagtgcagatttccccttcttccaataattcttataccattatgaataagggtgagctttatcagatagagctacagggagagatggaaaagatacataatgcccgtgccggtacggaagccgtagggcgtcaggtggtacaggctccgatgccgggggtgatcctgaaaatatatgtgaagaagggagacgaagtcaagcgtggagacccgctttgcgtattggtggccatgaaaatggaaaacgagattcgttctgtcaccgatggagtagtgaaagaagtctttgtcgaagccggtatgaaggtcggtttgaacgaccggattatggtgattgaatgattctcaaaaaaaataaaggtgttttacgtacttatctcaaaagttttctttacttttggcagataagtacgtatttatatccggatgtcttatgaacaacgaacaaacaaaagaagcactgaaagaggaattggagttgcttagaaaagaaaatgagcaactgaagcgacaacttcgatctctggaacagaataaacaacccgaagaaagctccaccagctttcaggaaaggtatgccgttaaaatattaaattccttaccggatatgctgactgtgttcaaccacgacgaagtgggaattgaagtcgtatccaatgaagaaaccaatcatgtcgggatatccaacaaagattttgaaggaatgcacatgcgccagatggtgcctcccgaagcctatcagaacatccatgccaatatgcagaaagtgatcgccacgcggactgtttcggcagcgcatcacgacatggatttcaatggctctcaccattactacgagaaccggatttttccgttggatgaagaatacgttctgatcatgtgtcgtgacatcacggagagagtggccacccagcaacagctggagatatttaaaagcgtactcgacaaagtcagtgacagcattcttgccgtttccagtgacggaacgctggtatatgccaacaagcaatttatggaagagtatggtgtcacccagcagatgggtacccagaaaatatacgacctgcccgtctctatgcgcacgccggagttatgggaagccaaactgaaagatatacgcgataatggcggcagcttttcataccgtgcagcgtatgtgcgcaaaggtgaggagaaaaacagagtacaccaagtctctacctaccttacacaggaggatgatacggagcttatctggttttttacgcaggacattaccgatgtaataaagaagcgggatgaacttcgtgaattgaatctcctgctggacggtattctgaataatatccctgtctatctgtatgtgaaagatcccgaggacgatttcagatatctgtattggaacaaggcatttgccgaacattccaagattcctgcctctcgggcaatcggccgcacggactttgagatctttccggagcgtgcagatgccgaaaggttccgcagggatgatttggaattgatccggacgcatgaacggatcgatatgcaggagacctacgtggcggccaccggcgagacccgtattgtgcagacactgaaagcgcttgtcccgatggaagggcgcgaaccgtttctgatcggtatctcctgggatatcactaactttcagaatatcgagcaggaactgattaaggcacgcatcaaggcagagcaatccgacagattaaaaaccgcctttcttgcaaatatgagccatgaaatccggacaccgctgaatgcgattgtcggtttctccaatttgttgccttctgccgaaacccttgaagaagaaaaactctattcgagcattatcaatcagaactcagagatcctgttgcagctgattaatgacatcttggatttgtctaagatagaagccggtacattggaatacgtcagacagccgatgaacctgggtgaaatatgtcggaatatctatcagattcataaggatcgtgtgcaggaaggggttacccttattctggataatcaagacgaagacctgattattgaagaagaccggaaccgcattgcgcaggttatcactaacttcctcaccaatgccggtaaattcacgctttccggtgaaatccgctttggctttaaagtcaataatcaatgtatccgtttttatgtgaaggatacaggtatcggaatagctctcgataaggtgggacatattttcgaccgttttgtcaaattgaactcatttgcgcaggggacaggtctcggacttgccatctgccggatgatcatagaaaagataggaggggagatcggagtcacttcggaaataggcaaaggatcgactttctactttacgataccttataaagaaagctcagatgaccgtattgcattttccgaggcttcggaaacgaaatacatcagccacaccatcaagaggatgcagaagatcaagaagattctggtagctgaagatgtggacagcaactttgtactgatcaagaatatgattggcaaagattacactctgctatgggcgaaagatggctttgaggcggtggaaatgtataaacagttccagccggatttgattctgatggatatcaagatgcctcgtatgggtggactggaggctacccgcatcattcgttcctattcgaaggagattcctgtcattgcgctgactgcctatgctttcgaagcggacaaggagcaggctttggaagccggctgcaatgactttgtcacgaagccggtttcaaaagcagcattggaagaggcgttggggaagtgttgcgggtagtaactacaagtgattatattatactcactttcctatttcgggaactaataagaactttgtttccggaaagtacttttcgagccaagctcgtataaactccatcgtatcatcttgaattgttttatcctctaccgtcggatagagattataaagtactgtatccagcacaatgtcccgtttctgtatggcttcaagactcagaagagtatgattgatgctgcctagctttccggaagtcacgaagataagcggatatttctcctgtgcgatatattcaattgtcaggagctccgtagtcagaggaaccatcagaccgcccgcgccttcaagcagaacacagtcataccgttcgcttaatacttcggtagcatgcttgatcttgtcgaaatcaatgggacgatgatccagtcgggaagccagatggggggaggcgggataagaaaagatctccggcatggtcagcccttcctgatcttcctgggtgaaagggatttccataatgcgccgatgcaggtctatatcttcggaatgccccacatttcctgtttggataaacttctgcgtaatggttcttttgccgtttttattccattcgcgtgccaggtagccggtcgcgtaacttttgccggcatcggtatcgataccgcttacaaaatatacattctgtttcatacttttttcttttttgctatgatataaatagggtgatatgtcagggacactgaagtgccctgtgtaaattcttgtgtgtaacgttcgcaaaaatgctgcaaatcacgacgggtccaagtctgtttctcatgcttcggatagagggatgattgcgctgacaaaccattcacccccgtctgcttcagatgatacagcactttcatcggatcctcgaaagaaagggggatcagctcttcttctgagtacagtatatcaaagtgaagagacagggctgcttcaagctcttcccttgaacgatagggtagtccctttccggtaagctcacgtatctctttcatattctttttcccaaaagtactgaaagcaaagtatccctgactgtgaagcaatgtattacaccttttgaagaactcctccggcgactcgaaccattgcaaagcggaacaggaagtaatcaacgtacttttatccggaaaagaaatcgtctccgcatctccggaaagaaaagagacttgtttctctcttaataaatcttcgcagcaatacctcatctccggacataagtcattcagaagcaactcttccggacgaagggtgcggagcaacattcgggagtaaatgcccgttccgcatccgaactcaatcactttcggacagggagagggaatatgtttctggagcaggcggatcattttatttgctatctgccgttgtacatttgcttcacggggataggtggagatggcttttgagaaacgttctgcaataattgtcttattcattgatcaatgattatttaatgttcatgattacctcattaaaaagctcctgctgataatgggcagcttcgacgtgcaggagggagactgccttgtttctccatgcctgctcttgatgttccggaaggaaaatccgatcgttatctccgatgatggctgtttgccagacaaactccgaagggagggatgacaagtattgctgccggatggcggcaagctcttctttcagttcttcaaccggacgtttgggagctattgtctgaaaagccttgtaatcagcagcagaaccacacattcttcgctgaaatttcagtagggtttgtgcgttcagtccttgcagggtgccttcaaaaacggatggcgtgattccttccgtttcgtgtatcggataaagtgttccgttgatggcggtactttgggaaacaggcagggagggatattgcttcattacctgcgaagccgcccagactcccattgaccatgcgatcagcgaaatcttggaatatgcctgtattaaagtcgtatcgaattccagcgaacgataatcgtaacaaatcatccagtcacattccgtcggatggatatgtcggaaaggcgtttcgtccattccccatcctgcgaagaatagtagaaggtgctttccattgttcctgataataaaagtctgcttcatccgttaatgatttctataagtgtatcgatttctttttctgtgatgtccgctgtcaatgagaagcggatacgggaagtcccttcgggtactgtaggtgggcgtaccggcagggcatagaatcccttgcgttgcaattcttctgccttcctgatggtatcttcgcttgctccaaccaccatcggcacgatgtggctgacggaaggacagttatatcctttctcggtcagtgcttctttcagtttcctgctgatttgcagcagatgctcccttttgctccagaaatcagcgaagtgtttcagtacccatgcggtccactggatattgacaggaggaagggccgttgtgaagataaaggtacgcatcttattgatcagatattcccggatggtctgtcggcagatgatatatgcgccggcggatgctgccgccttcccgaaagttcctaccagaaagtcgatgtcgttgatgcagttttgttcttcggcacatcctaagcctttctcgccccgtgctccgaaagcgtgggcttcgtctacatagagaagaaggttagcgtaatcgtgtttcaatcgtaccagcgcttgcaggtcggcttcgtctccgtccatgctgaagatactctcggtaacgatgattatcttctcatacataccgtggttttcttcaagaagacgccggagctgggctaagtcattgtgccggtaccggatacatttggcagatgataatctgattccgtctatcaggctggcatgtacgagtttgtccgcaaggatcaatgtacgggcatcgctgacggcaggaagtatccctgtgttggcgtgatatccgctattgaacagaagggcgctttctgctccgaacatagtagacagttgctgttcaagttcctgataggcagtgaagttgcctgtcagcaggcgggaggaagaggaagtgggcagaaaggtttccggagtgatggtctttaagaacgcttctcttaaagacacctcattggctaaccccagataatcattggatgataagttcagcatccgtcgtccgtctactgtcacgtctcttccatcatgaatcaactgtgggagggaacggtaattcttcttctcttttaaagtcagaagttcttgattgatagagtctaaaatcataatctattcattttttgagaagatagttaagttacatttctctgactattttaagtactccggaagtcagtttacttaattgctccggagagatgatgaacgggggcatcaggtagaccagctttccgaacggacgtacccagataccttcttctacgaagcggcgttgcatgtatgccatgctcaccgaacgttctgtctggatgactcctatggctcctaatatccgtacatccgctacttgcggaaacttgcgggcgggagccagttcttcttttaactgagcttcgattcgtttcacattctctgcccagccggagtcgagcagcaaccggacagaagcacacgccaccgcacacgcgagcggattccccataaaggtaggaccgtgcataaaagcctttggggcatgattggagatagtatctgctatctgattgcttgccaatactgcagacagtgtcatgtatcctccggtcagtgcctttccgatgcacatgatgtccggttccactccggcatgttcccaggcaaagagtttgccggtgcgtccgaatcctgtggctatttcgtcgaagatcaggaggatatcgtgttctttgcagagtttttccgcttcacgcagatactgcgggtgataaaaccacataccgcctgctccctgaacaatgggttcgaggatgagcgccgccagttctttggagtgtttctccatcgtttcccgcagggggatgatgtcgtccggattccattctccgtcaaatcgcgaagagggggccggaacgaaatatcggacaggaagcgatgaaccgaaaagactgtgcatcccggtaacgggatcgcatacggacatggcattccaagtgtcaccgtgataaccggaacggatggttacgaaattgtttttgtcgggctttccggctgcataccaatattgcacggccatcttcaaggcaacttctaccgccaccgaaccggaatccacataaaatatcttttgcatggatgggggaaccaagggcaacagcagtttgcctaactcgatggccggatcatgagtcagtcctccgaacatgacatgggacatcttgtctaactggtcttttgccgcctgattcaataccggatgattgtatccgtgcacagcacaccaccaggacgacattccctcgatgagtgtccgcccgtcttcgagtgtgatcgttgctccgtccgcccgctttactttgtagacaggcaatggatcggtagtagaagtataaggatgccacaaatgctcgcggtcaaactgggagtcggcgaagtggtaaccttcttctagaatcatcttcttgtcgtcggaaaccttggaaccgagtgtggtcagcaaatcacccacgatggcggaattgatgccgacaaacaaggctttgcgcatggcttcgggagtgagctgcgaacgtcctcctgcgaaacgcaggaaagcgttaggattgatgaagcggaacagggcgatggttcgcaggatttcttcttcgctcaatgccttttcattttccagtggagttccggggatcggacttagcaggttgatggggatggactgtacattcaattccgccaaagtgaaagcaaattcaatacgttgttccattgtttctcccatgccaatgatgccaccgcagcagatatccattcctacccggcgggcggcgtcgagagtggccagcttctgctcttgtgtatgtgtggagcagagtgtggggaaataggaaggagctgtttcgaggttgcagtgatagcgggtgattccggctgtgtgcaaggcgcggagttcttcttcgttgagtaatccaagggatgcacaaagttggatggacgaatgtttccgcataaggcgggccgcatcgcaaagttgactgatctgtttgggagaaggttttcgtccgctggtgacaagggagaaacggttgacgtcttgactttcgttgtattttgcctgtcggagacattcttcagcgggcaggagatcgtaaatcttggcttgagtcttgtagtgagaggattgtgcgcaccatttgcagttctccggacaccggccggacttggcgttgatgatggaacacatatcgaactcgtgcgaagcacaggtgacggtaatctcatgcgcggcggcataaagcgcctcgctgtcggccatgttggccagccaagtggcttgggcggacgatatgtcgaagcctgccagtacttggtctttgatttcttgaagtgtcataaatgtatgataagggatagttacttttgcattctgcttgcgaagagccacatctaccacattggtatgcagatgaccgatctgaaattcacgtcccatactcgcaaaggcggcatagttcttcctgccccagtagcggaagcgggaaagaagggaacgtgtggtctgtatgtggcgttgtttcttcatcaggttcttgttttttgaagttaagaacggggcaaatgtacaaagattctttggataagcaagcgatacaataatatactgcaaatatacacccttaccttgtatcgtttatacacaccctttatcttgtattttttcttctatactccttgcgtaaattgaaattgaatccgacgtatacctgtagtgttccgaacccgttgtccagtgagaaattgttccggtggtaattataattctttccgacaaatgaagtgccgacgaaatattttccgttattatagacaactcccgcacggatcagaaaatccaggttaaaattgccgtaccatgtcttcccttcatgggtttctgcatctacatcggaagctttgtaggctatggcgggagtgagagacaggcatgccagacagttgcgggcaaatacccagttataggcataaccgaaactgatattggcattggtgtatttgatgttgttgactttcatggcaggattcatcgcttccagtatgaaagccggaagttctgcatagtcgaactcaagattatgttttgaaatggaaaagcctgcgataaacgaacctgcattcctgcgctgattggttgactggctgaaagcggcagggtaggagaatttgcggttgttgaagatatagtataggttcaatcccttgatatctacttttattccattgaacttttcggagtaattggcggggacatcttccgggaaaccgttgatcttatgaatcttatagttgttacctgtgcgacggtagaagatgtccactcccagcttggaactgtatagacttaaatcgaactctgttcccttgttccttcggttggtcttccggtaaatgtcgtccacgtctacagaccatcccaggaagatccatcgccagccgaagtacaatcctatcttgttatgcggattgggagagaaactcagcttctgcggttggggcagattgctggtaacggaataatattcaaagttgctgaaatgggtagtcatcaatgcgtaattataccggttgggactgatgtaaagggtgtcgaagtcactgaaattcatgaacttcctgatcgctctcttaaaagcgcttggtttggccggtatcacagaatcagtttgcagactatcgctcataagggtatctctcctttcagcctgggcctgtaaggagagtgacagaaacagaaaaagagatagaaccatttgcttcatcctgtgatttttcgttgttatgattgatgctgttcgtttcacgaatgtactacctttcgttgatttatactaataatcgtctaaaaaaatgtttcgtttcctaaacaaatgagatatgtattctgttagttagaacaagcaaataaatcctaagccacaaaattatgagaatctatttacgtttattagtggcgtttctattgctttctgccggcaatgtagtgtatgcagaagcacaacaagagaaacgcgtaacgggtactgtgacttctgaaggagagcctttacccggtgtttccgtacaagtgaaaggggcctcttccggcaccattaccgatatcgatggaaactattcaattgaagcccctgccaatggggctatcgtgttccgctttgtaggattgcggacagtggaacaagcggtgaacaaccggaatgtgatcaatgtcacaatggaatcggagagcaaagaactggaagaagtgatggttgtagcttatgctactgccaagaaatatagttttaccggagctgcctcgactatgaaggcgggagagatcgagaagttacagacttccagcgtatctcgtgtacttgaaggtacggtatccggtgtgcaagccagtgcttccagcggtcagcccggtacggatgccgaaatccgtattcgtggtatcggttcgatcaatgcctccagtgccccgttgtatgtggttgatggcgtaccttttgatggcagcgtcaactcgatcaatcctgacgacatcgcttccatgaccgtattgaaagatgctgcatctgctgctctgtacggttcgcgtggtgcaaacggtgtgattatcattactacgaaacaaggacagcaggactcgaaagctactgtcaaggtgaaagctacactgggtggttccagtcgtgcggtacgcgattatgaccgtgtcaataccaatcagtatttcgaactttactgggaagcgcttcgtaaccagtacgccaagagctctgattatacccctgccaccgcagctacgcaggcttctaaagacttggttacaaaattgatgggaggcggtccgaatccttacggcacacaatatccgcaacctgtggggacagacggaaagctggcagcaggtgctcgtccgttatggaactccgactggagtgacgcgatggagcagcaagcgcttcgtaccgaactgaatctgagtgtttccggtggtggaaaggctaatcaatacttcttttctgccggctacctgaacgataaaggtattgcactcgaatccggctaccaacgtttcaaccttcgttcgaacgtgaccagtgaaatgacttcctggctgaaaggaagcatcaacctgagttttgcccattccatgcagaattatccggtttcttcggattccaaaacaagcaacgtgattacggcaggacgtactatgcccggattttatcctatttatgaaatgaatacggacggcagctacaagctggatgataatggggatcgtatctacgatttcggctcataccgtccttccggttctatggctaactggaacttgccggctaccttgcctttggataaatcggaacggatgaaagatgaattttccggtcgtacttatctcgaagctacgatcatcgaagggctgaaattcaagacaagtttcaacttcgacctgatcaactataatacgctggattatacgaatccgaaaatcggtccggctctggaaaacggaggtggttccagccgcttgaactcacgtactttttcatggacatggaacaacatcgcgtcatatgataaaaccatcggtgatcatcactttaatgtgcttgccggaatggaagcctattcgtaccgttatgatgaactgactgcttcacgtacgaagatggcacagcccgatatgcccgaactggtagtcggctcacagttgacaggcggttccggttatcgtatcgattatgctttggtgggatatctcacccaggcgctttatgactatcagaataaatactttttctccgcttcctttcgtcgtgacggttcttcccgttttgcaccggagactcgctgggggaacttctggtctttaggaacttcatggcgtatcgaccgtgaaagttttatggcttccactgccaactggctttctgctctgacattaaagatgagctacggtgcacagggaaatgataatctgggtacttattatgcaagcaagggactttataccatcgtttccaatctcggagagaatgccttggtttccgaccgtatggctactccgaacctgaaatgggagacgaacctgaactttaacgtcggcgttgatttctcactgtttaacaaccgtttttccggttcgttcgacttctttacgcgtcgttccaaagacttactttattcccgtccgatcgctccttccttaggatatggttctattgatgagaatgtaggcgcattgaagaatacgggtatcgagatggtgctgaacggaaccattatcaatcagaatggatgggtatggaaactcggaatgaacctgacgcattataagaataaggtgacggaacttccgctgaaggatatgccgcaaagtggcgtaaataaattgcaggtaggacggtcagtctatgacttctatatgaaagaatgggcgggagtagaccctgacaacggtaatccgctgtggtatatggatgagaaagatgccaatgataatttgaccggaaaacgtgtcacaacaagcgattatgcttcggcaagttattattacgtcaataaatcttccctcccgaaagtttatggtggtttcaatacatcgctttcatggaaagggttcgatctgtccgccatctttgcttatagcatcggcggatatatctacaaccgtgatattactatgattctgcacaacggaagtttggaaggccgtgactggtctacggagatattgaagagatggacaccggaaaaccgttatacagacgtgcctgctttgagcactacttccaataactggaactcagcttccacccgtttcttgcagaacaattcatatatgagactgaaaaacctgacgctatcttacgatctgccgaaacagtggatcagcaaactggcattgagcagtgttcaggtgtttgtgcagggcgataacctgttcactattcaccggaatcagggacttgaccctgaacagggaatcacgggtatcacttattaccgttatccggctatgcgaactatttccggaggtatcaatctatctttctaaaattacacgatatatgaaaaagataaaaattcaatctatacttactgctgttgccggactgtttctggcgacgagttgtagcagtagctttttggatacggaaccgacggatgcggtaagctccgatcaggtagcagtagccggaaatgcagaacgtctcttcaacggagcttggtataacctgtttgaatacggcacgacgtatgccaatattggttatcgggcacttcaatgtcaggatgatatgatggcaagcgatgttgtctcccgtccgaaatatgggttcaattcttcctatcagtttaatgatgtggcgattccttccgatggaagaacttcgtttgcctggtatctgatctataagacaattgataactgcaacactgccatttcgattaagggtgactccgaggaacttcggcaggcacagggacaggcattggctttgcgtgccttttgttatctgcatttggtacagcattatcagtttacatatttgaaagataaaaatgctctttgtgtgcctatatatacggaaccgactacaagcagtaccgagccgaaaggcaaatcgacagtggcgcaagtttatcagcagatctttgatgatttgaatcttgcacaggattatctgacaaactacgtccgcaagggagacgggcagaaattcaaaccgaatacggatgttgtcaacggtcttctggcacgtgcttacttattgacaggacaatggggagaggccgccaaagctgccgaagctgcacgcaaaggatattcattaatgactaccactgccgagtacgaaggttttaataatatttccaataaggaatggatttggggatctcctcaaacactttcgcaatcggatgcaagttataatttctactatctggatgcaacgtatgtcggagcttacagtagctttatggccgacccgcacttgatggatacttttgttaaaggtgacatccgtctgcctcttttccaatggatgcgtgaaggatatctgggttataagaaattccatatgcgttcggatgatactgcagatctggtactgatgcgttcggcagaaatgtatctgatagaagcggaagccaaggtcagggatggagtagcactggatcaggctgttgccccattgaatacattacgtactgcccgtggcgtaggtaattatgatgtgacagggaaaacaaaagagcaggtgattgacgaaattctgatggaacgccgacgcgaactttggggagaaggattcggtataacggatgtactccgtaatcagaaggcgatagaacgcatggctctatctgaggatatgcagaaaacggaagtggattgctggcaggaaggcggcagttttgcgaaaagaaatccgttaggacattggttccttaatttcccggatggtaaagcgttctcagcgaacagttcttattatctgtatgctatccctgaaaaagagattaatgcaaaccctaacttataaatagctctcttaattttttgactttgaccttaacttgtagaccggtatacgtcgtgacgatgcataccggtcgtttttttatacctgtatcttctgtttctttaaattgggcaaaaagaacgtgactaatcccaataacggcatataagcgcaaacgttataaaccgactcaattccaaatttatcagccatattgccaagtacagccgaagcgatacctgctactccaaaggcaaaaccaaagaaaagaccggaaatcaaccctaacttggtagggagcagctcttgcgcataaagtaggatagccggaaaagcagacgaaagcatcagccctacacaaaaacttaaaatgatggtccatgctaaagtggcatgcggcatcagtaagctaaaaggtgcagctcctaagatagaagcccaaatcacatatttacgtcctacacggtcgccgataggaccgccgagcaatgttccgatagcagtagctaccagaaaaataaataagtataattgagattcctgtacagttacattgaatttatgaatcaagtagaatgtataataactggtaaggcttgccatatagatatactttgagaagattaatatcagtaggatgccgatagataaagcagtcttatccatcggtaaaggcaaatgtacagcctttttcactgtagccttttgctctttcattcggttgagataagatttgtaccatttgcagatcgggtacatgacaccgatagcagccaaagcaaaaagcgcaaaaacggccagatgctctctgccataaggagccaccagcaaagctaccaataaaggacctagtgaacctcctaaattgcctcctacctgaaataacgattgtgccagtccccgtttcccacccgaagcaagaaaagtaatacgcgatgcctccggatgcaagacggaagaaccgattccgatcagaaaaacagagatcagcatccaataaagattgttggagaatgccagattgatcattcctatcattgtaaagctcattccgataggtagtgaccaggcaacgggatgtttatcgaagatgattccggtgattggctggaataccgaagccgagagttgataaaccagtgtgataaggccgatctgtgcaaagttgagtcccaaatcgtctttgaataatggataggctgccgatataacggactgcaaaagatcattgagacaatgcgaaaggcttaatgcaatgaggatagaaaacgtaattcttcctacgggttgttcctgattctgtaccataatacctattcttttgaaatgttcctgaaaaaatgactgcaaaggtacgtaaacttcccgtttctcaatatatttgtcactattaaatctataagtaatgaagaaagtagtagtagcgatggattctttcaaagggtgtctttcctcatcagaggcggaaaaggcggtggaagaaggcataaagctggtttgtccggattgtgaagtcattcgttttccgatagccgacggaggtgagggaatattgactgtcttggtagaagcaacacgaggcacttatcagaagatcatagcgaatgatcctttgatgcgcccgatagaaaccacttatggagtttcgggtgataaacgcgttgcttttattgagatggccaccgtgaatggtctgccgctattatcagaaactgaacgaaatccaatgctgaccactacttatggaaccggtgaattgatattgcacgctattgaacagggatatcgggaatttgtcataggtatcggaggaagtgctacgaatgatgccggagtaggtatgttacaagcattaggagcccgatttctcaataaggatggagcagtcttgggagaaggaggcgaaatcctgcatcgaattgccgctattgatttttcttccgttcaccctgcacttgaagatactcgtttcacgatagcctgtgatgtacgaaatcccttttgtggtccggaaggcgctgcgcatgtttttgcccggcagaagggggcggatgatacaatgatagagaaattagatgcgggtatgcagtctttttcccgattgatccattcaactaccggaagagaaatcactcacgttcccggagcaggagctgccggaggcttgggaggtgcttttcttgcttttctgaatgctgaactaaagcccggcattgatttactgctccaaacattgaaatttagtgagaaaataaaaggtgctgatctgatcataaccggtgaggggagaacagaccgtcaatctttaatgggaaaagtaccttccggaatattagaagaggcgaaacgacaagggataccggtcattgttgtggcaggcagcatagaggatacggaaattctgaatcaggcaggttttcaaggtctcttttctatcattccttcgcccatgtctttagaaacagccatgaagccggaagtcgctaagaaaaacatttgccggactgttgcccaaattatctctttagtgaatttatagtggcgtttggagtgtaaattgtcgttaattcatttttgacttactgaactattcgtggtacttgatgttgttaaataaaaaaggaggataaaatgggctttatttggtatattattattggtattatagccggctttcttgcaggtaagataatgcgtggcggaggttttggccttattataaatttgttacttggtattctcggaggagtgctgggcggttgggtatttgcccttttcggacttgcggcttcgggattgattggaagtttgataacttctaccgtaggagctattctggtattatggattgcttctttattctcgaaatctaaataaagattttatataatttatttttaatctaaaaacaaaacttaattatggaatgtagacatgggaatttctggattggacttggaattggttcaatccttggtgcagtagcttatcgtctttcacgtacagcaaaagccagacagttggaaagtgatatttataacgctattcaccgtatcggtcgtgatgctgaaatagcagcagccgaagctgaaagaaaagcgatgaatcttggcttaaaagctgttgaaacaggagctaaagtcgcagataaagtagctgaagaggctgataaagcagttggaaaagcaaaagaaaaatgggagaaataatcatccttgaaagtggtaatcaggtttaaaataaccggttatcacttttcttttatactaatagctttcttcttgaaaatttaccttaaccaaatactgtcactatccctcatatctgcttatgcataaataaatcagtgtgtgcccgtacacattttaccttttatatccctcttttttattcttttcacagataaaaagcttttctgacatggtgtttattacctcccaaacatatatttgatggctttttccattatttttcttatgtttaacaacatacgtattacttgtcttcctttattaaatgtctgaatatcatatttatagcatttttatagtagaacgtgtgtgcgcacacacttttgcttaattcaataattcattttacatttgtcgtcgaaaaacaagatacttatcagtaaatggacaaagaattctcaaatattcgtattgtagacatcgccaagatggcgggagtctctgtcggtacggtagaccgggtgattcacaatcgtggacgggtatctgaagagaacaggaagaaagttcagactattctggagatggttcattatcagccgaatctgatggcgcgttcgttggcatctaaaaaacaatatcattttgtggcaattactccttcttttacgcacggagaatattgggaagctatttccgatggtatcgataaggcggcttcagagatggaatcttataatataacgatcactaaactctttttcgatcaatacaataacaagacatttgatgatattgtccgcaacctgttggatgaaaaagtagatggggtattgattgcaacactgtttaccgactctgttatacggctttcgcaagagcttgacaggaatgaaattccctatgtttatgttgactccaatattgaagggcaacatcagttggcatatttcggaacggagtcttatgatgccggagtgattgctgcgcgattattgacagacaagatttcttcgacttcggatattctgatggcacgaattattcatagtggaaaaaacgactcaaatcaaggaaaaaaccggagagaaggcttttgtcattatctgaaagaaacaggatttaccggaaatttgcatgaagtagaattgaaaatcaatgattcggtttacaattttatcaaactggatgaaatctttgaagcgaatgcaactatagaaggaggaatcatctttaattcaacttgctatatcttaggaaactacctgaaagcaagaggaatgcaaaaagtaaaattggttggctacgatcttattgaaaggaatactcaactgctctccgatggtgttatcactgcattagttgcacagcgtcccgaacgacaaggatatgatggtatcaaatcattgtgcaatcatttgctgttcaagcagaaccccgaaaaggtgaacctgatgccgattgatattcttctaaaagaaaatctgaaatattatctgaacaataagttataaaccatataaataaaagaaccatgaacgaattatttaacgtaaaggacaaagttgttgttatcaccggtggagccggaatcttaggtaagggtatcgctgcatacttagctaaagaaggagctaaagtagttgtactcgatagaagcgaagaagcaggtaaggcattggtagaaagtatcaaagctgaaggaaatgaagctatgttcctgtatacggacgtaatggacaaagaagtgctggaaggtaacaaagtggagatcatgaaagcctatggacgtattgacgtattgctgaacgctgccggaggtaatatggcaggcgcaacaattgctccggacaaaactttctttgacttgcagattgatgcctttaaaaaagtagtggatctgaatctgtttggtacggtattgcctacaatggtatttgctgaaatcatggtagaacagaagaaaggttctatcgtaaacttctgttccgaatcggctcttcgtccgttgacacgtgtggttggttacggagctgcaaaagctgctattgctaacttcactaaatatatggctggcgaactggctttgaaattcggtaacggtctgcgtgtaaatgctatcgctccgggattcttcctgactgaccagaaccgtgcgctgttgacaaatcctgatggttctctgactgaccgttccaagacaattcttgctcatactccgttcaatcgtttcggtgaaccggaagatctttacggaactattcattatctgatcagtgatgcttctaacttcgtaacaggtacagtagctgttatcgacggaggtttcgacgcattctccatttaatacctattacttattacttattacctattacttaatacttatcatattatgtatctatgtgaacaaacttggcgctggtatggtccgaatgacccagtaagcttgtgggatatcaaacaggcaggcgctaccggtatagtaaacgcacttcatcacattccgaacggcgaagtgtggacagtagaagaaatcatgaagcgtaagcaaatgattgaagaagtgggcctgacttggtctgttgtagaaagtgtacctgtgcacgaacatatcaagacacagaccggtgatttcttgaaatatattgaaaactataaggaaagcatccgtaatctggctaaatgtggtgtaatggtagttacctataactttatgcctgtattggactggacacgtacggaccttgcctatacaatgcctgacggttctaaggctcttcgctttgagagggcggccttccttgctttcgacctctttattctgaaacgtccgaatgctgaaaaagactatactccggaagaaatagctaaagcaaaagcccgtttcgaacaaatgagtgaagacgataagaaattgttggttcgtaatatgattgccggacttccgggatcggaagaaagtttcactgtagaacagttccaggaagcattggatcgttataatgatatcgatgctgagaaacttcgtgctaacttgatcttcttcctgaaagaaattgcgcctgtggctgatgaggtaggagtgaagctggtgattcatccggacgatcctccttatacaattttaggtttaccgcgtattctaagtacggaagaggactttaaaaaactgattgaagccgttcctaacgaatctaacggtctttgcttgtgtacaggttctttcggtgtacgtgctgacaatgaccttgcaggtatgatggagcgttttggcgatcgtgtcaactttgtacacttgcgtagtacacagcgtgacgaagaaggaaacttctatgaagctaaccacttggaaggaaatgtagatatgtacaacgtaatgaagagcctgattcttctgcaacaacgtcgtaaatgttctatcgctatgcgtccggaccacggtcatcagatgattgatgatctgaagaagaagacaaatccgggatattcctgcttaggccgcctgcgtggattggcagaacttcgcggtttggaaatgggtattgcaaagtctattctataagcagaattcataattagcaatctattttaaagacactacggctattattgacagtaataatagtggtagtgtcttttatattgctcatttacggagctttcgtattaaaataagcttccggtgtgcaaatcaacttttggctttttaggctcggggatgatgagcaaggctatttgtgcacaagcctcagcatcggcgagagcatggtgatgattggttaaatcatatccgcatcgggctgccaccgtatgtagctgatgattgggcaattcttttccaaacactttccgtgaagtgcggcaagtacaataaaacttataattgggataagtcatttcgtatagctcgtgaacagctttcagacagccctcatcaaaaggactgttgtgggcaacaaggggaagaccgtctataagcggttttatttctgcccatacatcaggaaaatcttccgcttcttccgtatctgcgtaagtcagtccgtgaacagctgttgtccattgcgtataatagttggggcaaggacggatcagacgatagattttcttaacgatttttccgttcctcacgatgacaacccctacgctgcatacgctggtgcgctttccgttggctgtttcaaagtcgatagctgcaaagtccttcatgcgttttgctgttttttgaaacacaaatgtacatgatattttttgcaaaatacatgaattggcatttattctctttatatttgcgtataaaatagaccgatgtacacagaatatcagccctctcgtctactcgctccctatatcgataattattgggaatttaagggaactccggaatatggcatgcgtatccatattttgccggatggttgtaccgattttatttttacgttgggagaagcagtgagtaaggtaaaagaagaaacgctggtcatgcagccttatcgttcttactttgtgggtccgatgacgaaatattcggagcttgtcacttatgccgaattcgttcatcagtttggcgttcgttttctgccttgtgggttatccggatttacaaagttgcctttgcatgagtttgcgaattacagagtcagtacgaatgaaatgcaggcggtttttgacagtacctttatcgagaggttatgtgagcagaatgatgtccggggacggattcaggtcgttgaagaatatctcctggcgtatcttgcacataactatcagcctgttgatacccaagttgccgcagcggtgaatataatcaatcagtccgcagggaagcgttctgttcgtagtctgatggatgaggtatgcctgtgccagcgtcattttgaacggaagtttaaatataacaccggattcacccctaaagaatatagccgaattgttaaattcaagaatgcagtagaattactgagaaacacgacctttgtcaacctgctgactaccgccatcgacgcaggatattatgacctggcacatttctcaaaagaaatcaaaacattgtcgggcaatacaccttcatcattcctttcgcttacagttccggaggatataacgctgacttatatcgaaccttagcaccggattagtaaaagtcgattttttacaatagaacggacatctgtgccgttatctttgtggcgaaataaaataaatacaataagattatgtcaacaaaaactatgaaagagaaagcggcggagttattgcagaaatgcgaagttgtcacccttgcttctgtgaacaaggaaggctatccccgtcctgtgccaatgagtaaaattgcagcagaaggaatttccactatctggatgtccaccggagcggcttcattaaagactattgattttttatcgaatccgaaagcaggattatgttttcaggagaagggggacagtgtggcattgatgggagaagtggaagtcgtgacagacgagaaactgaagcaggaactttggcaggactggtttatcgaacactttcccggtggtcctacagatccgggctatgtattgctaaagttcaccgccaatcacgcaacctactggattgaaggtacctttattcataaaaagcttgactaatcttgatctggagcgattataaaattgacaggtaacggtacatttgtgtacgaaaaaagagaaagacattcccaaagtaaggactgtttttctcttttatgtttaggctggaagacgtgtttttcgtctatctggcattcatttagaattcaaacttttccagtttcatttcagctaattcctgaatgatacctacgtattgtgcaaaatgagcggttttttcgtgtgctgctaatacttcagcattctgccatgtttcgcaaatcatgaaaacatcacggcgggtactgctttcaaaagtatcgtaagcaatgcatccttcttctttcaaagagcaggcagtcagttcttttgctgcctcaatcgctttttcgcggtttgtttcgtttacacgaacaaaaacatttaatctgatcatagttcttttattatttatgtgattaaaaagaatggtttcatcactgtgtttgtgaagaaccgaaggcaaagatagtatttttctgtagcttcctgcaggctgttttcaaattttcatataaacttcacataatcataaaaaatcggttatatttgcatctgaattctaaaagcaactattttgggcaccattcttaaatttgttatagcttaatattagcctcataaaccacaggctaatttctttcgtttgagtacttctacttgaaccggtttttcattttatcaattttattattcactgcatcgtttttttaagacgagtgcaatttggtattcaggcttttagtcagactccttttgacggttcgaaagctgtgagtacattgagaatgaatggaaaatttcgtaagaaatagtaagctgaacatagaaaaagaaattaaaaggattgagcaacagccgattgcccttctcgagcggataaagcagataatagatgtcatacagacatcacatactttgctgaaaagggcagttgccgaatatcaatttcagaatcctgaagaagaaattcagttctttaaagtctggaaaccgcagatttccggcttgctgatgttttatatccgtttatatcagattgaaaagaaccgtgtcggcaaatccctgtcggctcaatgcaaatatttaaagatggagctggagaatatacaaaagtcatttttgaataatagcttctatgattattatcgtgccggtcagaccgaacttgataaccaatattttatccgtgagaattatgatattctttccgatgttcattgtcatttgctggacagggattcttcttttaccaccttacacgattcaagcgttgcaatgattctggcgaatagtcatttgatagaatatgtatcagacgagatcgatttgctgtcagacaaactgcatcttaaattcacctccatagtagacagtaagttgctgcaatggacggatggtaaagtcgccttggttgaattcatctatgcgatctatgcgggcaaatgctttaataatggaaataccagtctgaaagacatcgctttttgttgcgagatacttttcaatatcgagattggggacttttatcgtatcttcttggaaattaggaatcggaagaagagcaggacacaatttcttgataagttgaaggataaaatacagaagatgatggaggagctcgacggataaatttcacgccatcttgtgacatcttgtgaattttataaatggcttatatccaactttgctttatggatacaacatttacatgggagataaaggcaaagaattctcctttattaattaagaaatgcagtcattgcgatagtgaccggttttactgtagtgataagtttagaatgaatgcgcagaaaaagaacatcgatgtctggctgatatatcggtgtgtgaaatgcgataatacatgcaacattactttgctgtcacgtaccaaaccggatttgatagataaagtcctgtttcatagcttttccatgaacgatcggaaagcagcctggaaatatgctttttctgccgaacttgccggcaggaatcatttgaaaacggattatgatagtgtagaatatgaggttacggataacttctcgaaagaagatataatccgtgtgcccgatgcaaccataaagattcaaattaaatatgagtttgaatttaatctgaaattgtcgtctttattaaaaaggaattttcttctttccagcactcagctaaggcgtctgtttgaacagggagtgatttcgcttctttccggtaaagagccgcagaaatataaagtaaaggacggagatatcctgttgatggataaagaacatttgcttgttatgatggactttgtggatagctttatggtaaaaacaggcattgattgattttttattactacatttgtctgatatgggacagggaattcagaaactaagtactattataaattcagagatatgagaaagttgtttttattagctattgttttatgtgtatggagtgttgttgccgatgctcaggagagtgagagaagatatattgaggtaaccggttcttccgaaatagaagttgtgccggatgagattcatcttttgattcagataaaggaatattggaaagaggaatttgtgccgaattccaagccggaagattataaaacgaaagttccgttggaatggattgaaaaagatttgcgtcgggtgctaagtagggcaggaatttcggatgaggctattcgtgtgcaggaaatcggagactattggcgtcagaaaggaaaagaatttctgataggtaagcaactggatatccggtttactgacttcgaaaagataaatgctgttattaagaagattgatacgaaaggcatcgagtccatgcgtatcggggagctgaagcacaaggatttgccgaactatcggaaacaaggtaagatagaagcattgaaagcagcacgtgaaaaggcatcttatcttgtggaagctatgggacaaaaactgggtgaggtcattcgtattgtcgaaccggcttcgagctatgtaagtccttattctctttatcaggcacagagtaatgtcagtatggggacagctgccactgagcaatatcgcgttattaaattgcggtatgagatgacggcgcgttttgctattgaataatttttttcttgctaagaattacagttcgcattacataaaactgtacctttgtatgcgatgagctattcgtctgacagctgttgaactttcgtctgacaactgttatcttttcgtctaacaactgtcagacgaaaaagaaacagttgtcagacgattatttttatgctaaactaaagttaaggtttagtataagaggactgaaatgttagcgaataaactgatagacacataaacaactaataaaaaatatactaatgagtgcattttatgatttgtatgagacgccggaccctaatgatacaggggagaaacaacctcttcatgcccgcattgttccgagtggaacttattcgaaaaaagattttatagaacgggtatcccgtcaccaaccttttccgcacaatataattgaaggagtacttggcgctgtagttgatgaactggccgaagccttggcggatggatacatcgtggaactgggcgaacttggacatttcagcatttcgttgaagtgtacccataaagtgatgactaagaaagaaattcgtgccgagtctatccgttttgacaatgttcatttacgtacttccaaagagtttaaaaagaaaataaagcgggagatagaacttgaacgagttgagaactccaaagtaaaaactcacgatactaaaatatccattgaagaccgtctccaaatgttgcaggaatttctgaagaagaacggaggaatcacgcgtatagaatatagcagactgaccggactcccccgattgaaagcaattgatgatttgaatactttcatcaaggagggaactcttcgcaagaggggagcaggaagaactgtcttttatgtgtggaaacaggaagaatgatattataacagaaaaccatctttctttttgctaacaattttgtatctttgtgtgtatatagagaaaatagtaagattatggcaagaataacaataccttatgcagtagctgatttcatagatttgcgtgaacgaggtttttattatgtggataaaacagattatattcctaaattagaggattataatactcctatacttctcctaatgaaataatacgtaatgaactattgcagtcacttaaaatacaaatatgaaaacaaagaaattattaggaatattttttctattcctttgcacaattacccttgtaagttgtggagacgatgaaaagcaagaaatatattctctgtcatttgagaaaggatattatgagcgtcctttgttgggagcaaaaaatatccccgtcagaggtggtaatagagactataccgtaaccgttcaaaatacagatgttttaagcatagatattgatttatcaagtccgatagatatgggtaatttagttgtgaaacccaaacaaaaaggagaaaccaccattactgtcaaggataatgtaactaacgaaacggttgatttaaaaataaaaatagtcgatagttatttgaacctgaaagttgcacatcctgcacaagtaccctacaccggaggtgaaaatctattttttataaataattcagatagggatttttatcttttcgatgaaaaaatggaaaagaaagaatgtacgggaaattaccagtttcttattaaaaacagtacttgttatatgatattgaattttgataaggagctgaacgataaaagaacctatgaatacaatatatctaatacatcagaacgtatgtttactcttatagaaatattgttaggtattgactggaatatgaaagctgatttaattaatagatcaacaaggtcagcatctcctgtgacaatgaatgcggtagatacagaaacaaatataattcagtattttgtggcaggctcaaacgatatacctgaaaatatattggattagaatcggttattactattcttttaataacacatattaagtcagataatttgcgccgtctgtttcatacgagtatctttgccttactgttctgttaaaacgataggggagaatgtatcacaagagaaaaataagagcatacatagcatggatgttattcatgacattcattcccttctttgtagtgaaaacctttcactatcatggaagtgaagatgaaacgtcatgctctcatgccgaacattcccggagtcatgccgaggattgtgccatatgtaaatactccctttctctctttacagaacctcagtcggtagaatttcactgtatattgacgctcgttccttacgagccgattacttatcaggataaggttgtctgcaaacggacttattcgcatcacctacgcgcgcctcctgccgcataattacatattcatattttctaggaagacaggttcattgtaacttgtcctcacattcattttacacattatataaaagattgtaattgatgcgtatcggaattatttcgggcgtaatagggttgtttgtaaccttacccgtccacgcacagaagtccgattcaatcaagagtatgcttttgcctgatgttgttgtgaccgagtcgtaccaacagcgtcaagccaagaagtctgcacttacggttgaagtgatagaacaggattttctgcgcaaacattttacgggaaacttcatgcaggcaatggagaacattcccggagtacaagctatggacataggctccggcttctccaaaccgatgattcgggggatgggattcaaccggatagccgtattggaaaacggaatcaagcaggaaggccagcaatggggagccgaccacggactggaactggatgcctttaatatcgagacagtcaatgtattgaaaggtccttcctcactgctttacggcagtgatgccatgggcggagtgattgatatagcctctcctcccataccttctgcgaatatgctcttcggcgatgtcaccctattgggcaaatccgtcaacggaacactggcaggttcgctgatgctgggacttaaaaagaatgcctggtatgcgcaaatccgttattccgaacagcacttcggtgattaccgcatccctacggataccattgtctacctgactcagaaaatgcccgtctatgggcgtaaactgaaaaatacggcaggagtggaacgcaatatcggccttttcacccaatatcagcgaaaaggctataaagcagactattccatcagtaatgtctatcagaagacggggttctttccgggcgcacacggtgtccccgacgcatcgcgcgtagaagatgacggagacagccggaatatcgaactgccttacagcaaggtaaatcatctgaaagtaaccacacatcagcaatatgcttgggagaaactgatcctgtccggtgatttgggatttcagaataaccatcgggaggaatggagtgcttttcatactcattacggctcccagcctgcgccggagaaggacccggataaagaactggctttcgatctgaacacatacagtgcttcggtaaaagcccgctttattggctcttcttcatgggagcatacgttggggtgggatgggcaacatcagcagaacgacatttccggctattcattcttgttgccggaataccatcgttctactaccggattgctctggcttacgacgtataagcctaataacattctctctgtcagtggaggcgtgcgatatgattatggttatattggcatctctccgcacgaggacgtttatctggcggattaccttcggaggcaaggatatgatgatgaacaagtagagtcctataaatggaacagtcatgccgtccgaaagcatttcggtgactattccttttctttgggactggtatggacaccctccgttcagcacatggtgaaagtgaacatcggacgtagcttccgcctccccggagccaatgaactggctgctaacggtgtacatcacggcactttccgtcacgagcagggagatgcttctctgaaatccgagcaaggatggcagatggatgcttcctacaacctgcgatatcacggattttccgtttccgtgtctccttttgtcagttggttcagtaactacatctttctgcgtcccacaggcgaatggtcagttctgccgcatgccggacagatttaccgctacacgggagccgaagcactgtttgccggaacggaggctacgatagacattaactttctgcgtcacttcaattaccgtatctccggagaatacgtctacacctacaactgtgacgagcatattccgttaagtttttctccgccgttcggtatgcggaatacgttgacatggcaaagaaaacactatatgctttatgcggagtggcaacttattgcccgtcagaaccgtgtagaccgtaatgaggaccgtacaccgggggctaacctgtttcatttgggtggctcgctgaatattccggttggtaggactaacgagatagaaataaccctgaccgcccgtaatatcttcaataccagatattacaatcatcttagtttttacaggaaagtagaaattccggaaccgggacgaaacttccaattattaatcaaaattccatttaaaaaattactgtaatgaaaacaaaactttacctcccgatcatcagccttctggcaatgtctgtatttgcatttatttcttgtgacgattcggatagcgataccaccaaaccggtgattgaactaagtgaaccggaagaagggcaagaactgaaaattggcgacgagcacggagtacattttgaaatggatctgtcggacgacgtcatgttaaagtcatatatgattgaaatacatagtaatttcgaccaccattcgcatggaaagagcagggctgctgctacgggcgaagccactgtcgatttcagtttcaacaggtcttatgatatctccggaaagaaaacggcgcatatccatcaccacgatattgtaattccggccaatgctactccgggcgattatcatctgatggtttattgcacggatgccgcaggaaacgaaacctacattgcgcgcaatattgtactgagcactaccgccgaaggggacgatcatcatcacgatgaataaataaaatagccagcctgccatgcaaaacgggggcgggatggagtatcttttttctcttattaatcagtgttcgtataattttctttaaaaggtgtaatagttattacaccttttgtgtttccaaagctttacttttgtgaaaaatactttttcactatgatgaagttaccatttataaaccgaatttttccttcgtacagatcgaagataatagccattatcattggcggtattattgtaggcggaggagctttatttatgtacatgcttcgggcacatacgtatctgggcgatgatccggcagcgtgtgtgaattgtcacatcatgtctccttattatgccacatggtttcacagttcacatgcacgggatgccacctgtaacgattgtcatgttcctcacgagaacattgtaaagaaatggacattcaaaggaatggatggtatgaagcacgtcgcagctttccttaccaaaagtgagccacaagtgatacaggcccacgaggccagttcgcaggtgattatgaacaattgtattcgttgccatacacgactgaatacggagtttgtaaaaacaggaaagatagattatatgatgtctatggtaggagaaggaaaggcttgctgggactgtcatcgggatgtacctcatggtggtaagaattcgttgtccgctactccggcagctatcgtccctcttcccgaatcgcctgtaccggaatggctccggaagatggttaataataaggaataagcatatacataactacgtaataaaataataaaaccgatatacaatggaaaagaaattaaaatcatggcaaggatggctgttgttcggaggttcaatggtcgttgtttttgttttaggattatgtgtttctgcgttgatggagaggagggcggaagtcgccagtatctttaataaccgcaaaactgtcattaaaggtattgaagcacgcaacgaactgtttaaagatgattttccccgcgaatatcagacttggacggaaacggcaaagactgattttgaaagcgagtttaatggcaatgtcgctgttgatgctttggaaaaacgtccggaaatggttattctgtgggcaggatatgcattttcaaaagactattccactccgcgcggacatatgcatgctatcgaggatattacggcgtcacttcgtaccggttctcctgcaggtccgcacgatggccctcagccttctacttgctggacttgtaagagtccggatgttccccgcatgatggaagcattgggagtcgattctttctataataacaaatgggctgcctttggtgatgaaatcgtgaatccgatcggctgttccgactgccacgatccggaaacaatgaatcttcatatcagccgtccggcattgattgaagctttccagcgtcagggaaaagatatcacaaaagctactccacaggaaatgcgttcattggtctgtgcgcagtgccacgtagaatattactttaagggtgacggtaaatatttgactttcccgtgggataaaggtttcactgtagaagacatggaagcatattatgatgaggcaggtttctatgattacattcataagttaagccgtactccgatcttgaaagcccagcatcccgactatgaaatagctcagatgggtattcacgggcaaaggggcgtttcttgtgccgattgtcatatgccttataagagtgaagggggcgtgaaattcagtgaccatcatattcagagcccattggcaatgattgaccgcacctgtcagacttgtcatcgtgagagtgaagaaacattacgtaacaatgtgtacgagcgtcagcgcaaggcaaatgaaatccgtaaccgtctggaacaggaactggcaaaggcgcatatcgaagcaaaatttgcctgggataagggtgctacagaagatcagatgaaagatgtgcttgcattgattcgtcaggcacaatggcgttgggacttcggtgtggcatcacatggaggttctttccatgcaccgcaggagattcagagaattctttctcatggtctggaccgtgctatgcaggctcgtctggctgtatccaaagttttagcgaagcatgggtatacggaagacgttccgatgccggacatttcaacgaaggccaaagcacaggaatatatcggtcttgatatggatgctgaaagagctgctaaggagaaattcctgaaaacgaccgttccggcatggctggagaaggcaaaggcaaacgggcgtctggcacaaaagtaaaatagggatatatgtggagcaaaccgtggagttataaagaagggctggtgattggtgcgggattactggtgataggtattttgctgcaaatggcagtgggagccatcaactggggcctgtttgcctgtccggtcaatgcgattgtgttagtggtttatatcatagcgctggtagccatgcaccttcttcgtaaacgtgtgtatctgtttggatggttgagccattattccgctgccgtttcttccctggtatgggtagccggcatgacggtgatcatgggacttatccggcaggctccttccggtcatgcttccaatgatatactgggattttcgcagatgatttcgtcctggcctttcgtcctgctttacttttggatggtcactgtattgggactgaccatattccgtgccagctttccattcaggattggcagactatcctttcttctcaatcacgtaggattgctcgtggcattgattacggctactttgggaaatgccgatatgcaacgcttgaagatgactacccgaatgggaaacgcagaatggagggctaccgatgataaaggaaaattgatagaacttccgttggctatcgaactgaaggattttacgattgatgaatatcctccgaaactgatgctgattgacaatgaaacggggggagtactccccgaaaagtctcctgtgcatttactgcttgaaaacggagtttccgagggcagtctgctggattgggacttgtttgtcgaacagtctattccgatggctgcctccgtagctacagaggacacactgaaatttacagatttccattcgatgggagcgacatatgcagtgtatctgaaggccgtcaaccgaaagaaccaacaggcgaaagaaggctgggtgagctgtggtagttttctctttccttataaggcattgcgtctcgactctctgacgagtctggtgatgccggaacgggaaccgcaacgttttgcttcggaagtaaaagtctacacacaggaaggaacgataatggaaagtacgattgaagtaaatcgtccgatggagatagcaggatggaaaatttatcagcttagctatgatgagtcgaaaggtcgctggagcgatatcagtgtctttgagctggttcgcgacccgtggttgcctgtagtatatgcagggatcattatgatgatgctcggagcaatttgtctgtttgtcaatgcacaaaagaggaaagaggaggacaaggaatgagttgggaacattttatatggtttgcgatagctgcattgatttgctggagcttgggcgcgtttgctgcctggaaaggaaagaagccggtatggacctatggatttaccttgttggggctggtcatctttttcagttttatcttcggtatgtggatttctctggaacgtcctccgatgcggacgatgggagagacacgtctgtggtattctttcttccttccattggcgggtttgataacgtacgtgcgttggaaatataaatggattcttagtttcagttgcattctctcactggtatttatctgtattaatatctttaaaccggagattcacaataaaacgctgatgcctgctttgcaaagtccgtggtttgcccctcatgtcatagtgtatatgtttgcttatgcgatgttgggagctgcggtggtcatggctgtctatctgctttggttcaaaaagaaggatattgaacggaaagagatggacttatgcgataacctgacttatgtgggcttggcatttatgacattgggaatgctgacgggagctatctgggcgaaagaagcgtgggggcactactgggcttgggacccgaaagagacatgggcggcagctacttggttctcctatctggtatatatccatttcaggctgggcagaccgttgaagagtcgtccggcattagtcattctgttagtatcatttgtcttattacaaatgtgttggtatggaatcaattaccttccatcggcacaaggagttagtgtacatacttataacttaaattgaaatatcaatgaaaacattttattggtcattcgttcttatgctattgccaagcatggcatacacacaaactacggagaaggaaaatgaattttcgatgtctatgcaaatcagacctcgtgcggagtatcgaaacggtgctttagtccctcgcaatgaagggcagaaggctgcatcattcattaataaccgtgcccgtttgtcactggactacaagcgttcggaccttgaaatcaagatgtcggcacagcatgtcggagtatgggggcaagatccgcagattgacaagaatggtcgctttatcttgaatgaggcatgggcaaagctggattttggaaaaggcttctttgcacagttaggtcgtcagacgttagtttatgatgatgaacgtattttgggcggactggactggaatgtggcaggccgttatcatgatgcgttgaaactgggatatgccaataagaataatgaaatacatgctattctggctttcaaccagaatgatgaaaaaacggcaggtggtacttattacaattcttctattggtcagccttacaagaatatgcagactgtgtggtatcactataaagcagataagattccgttcggggcttctttactgtttatgaatttagggttagagacagggaatcagctcactcaagattctcatacccgctacttgcaaacgatgggaacttatcttacatataaaaatagcggatggaacttggatggcgctttctactaccaaacaggtaagaacaaggatgccgagagtgtttctgctttcatggcaagtgctacggcagcttatgcgttcaataaaacatggggaatggttgtaagctttgattatttgagcggaaatgaagaaggtagtagtaaatataaggcttttgaccctctttatgggacgcatcataaattctatggcagcatggattatttctacgcttctgcattcaacaaaggatttgctcccggattaatagatggtcgtcttggggctcgttttcgtgcatctgccaaggtagatatggaactcaattatcattattttgctactgctactgaagtagattttaaagaagatttgaagaagtcactcggttcggaagttgactatcagatcaattggtccgtaatgaaagatgtgaaactctctgccggttattcttttatgcttggaacgaagacgatggatgctgtgaaaggcggaaatcataagagctggcaagactggggatgggtatctgtcaatatcaacccgaaagtgttttttacaaaatggtaattgaaacctagctaggattcagattaaaccgttgatagaatataaaaagtggcacagcattaaatttaggctgtgccactttctttttattataagtatttctccagcgccattttattcagaatctcgatcttttttccttccattgtgatcagcccttccttgattatcttattgatttctttggataaagcaggacgtgatacattcaggtactcggcaagctgtgactgggtatgcatgatctctacagtcagagaatcttttttcttatgttcgaataagtaaacaataaacctttcgcgtacagtcttgcgcgacagaggtttcaaacgtgatacggtacatatattgcaatttccggcgatgcaaagaaaattgtgcaacacctgcgggtcctgactgatgactttaaaagtggaatctttggttgccatgagtaccacgctgtcttccaaagcagtaaaagtagctggcaacgtattgtttgaattgaaaaggtgaggggtggcaaaggtacgtggtgcgatgatatactcaatcatcacttcgttccccaatccgtcaatgatatccgtgcgtagttttccttccaataacacatatagtttgttgcaaggtgtaccttgcgtaacaactatttcttttttatccgctgcatagataacgaaatccagtttatccagcagagattccttaatgttcagaggtaaatcccgaaataaagggatttgaaataatttttctttatgtgcgttggtcagttgtatttttttcattgcattatgttgttcgtatcatgggcaaagatatgaattatatatgggcagagaaaatctttttttatgtttgtgccgccgaaagaccgattatggatgagatgaaaaggatattgataaaaagtaaaaatggcagaaaatgtttgaatcagtaattagggtacacatctctgtaatttatctacatttgctatatgataaattgtctatttttgcagagtgaaaaagctgattaatgaaattcaaaaaataaaagtaataaagttatggctaaaaaagttctgattatttcgtccagcccccgaaagggcggtaattctgatatgctttgtgacgaatttatgaaaggtgttctcgaaacaggcaatgaagtagaaaagatttttctgaaagagaaagtaattcatccttgtacgggatgtagtgtttgcagcatgtatggcaaaccctgcccccagaaagatgatgccgcaggaattgtagagaaaatgattgctgctgatgtcatcgtaatggcaacacctgtttatttctatacgatgtgcggacagatgaagattatgattgaccgttgttgtgcgcgttatacggaaataacgaataaggaattttatttcattattgcagcggcggagaatgataaggggatgatggaacgtacgattgatggtttccgtggcttccttgattgtctggaaaatccgcaggaaaaaggagtgatttatggaataggtgcctggaaggtaggagaaataaaagatactccctacatgcaggaagcctatgagatgggaaaaatggtgtaaacgttcgctttaggtaaacatttcccgtcttatataacaacctttcaggatggtgtcactatgctgagtatatagtgacgctatacctgtaggatagtgacactaaagcagtatgatagtgacactatagtaatgggatagtgacaccatatttttgtctggatttaatgagagaagtttagtttaacgattctgttacaataatcttctttcgttcgattccagctccaataaagtctttttagctacaagaccaccggcatatccggtcagtttatgatcactgccgatcaccctgtgacaaggaataagtattgaaatcgaatttgctccattcgaagaggctaccgcacggatagctttaggattatccagtctctgtgataattgagcataagatatcgttgttccgtagggaatgtttaataattcattccatacactcttttgaaactctgtcccgacaagaagcagaggaatatcaaacgtagtcctttgacgggaaaaatactcatctagctggctgatcgtttgcgttatcacttcagagttttctattgcgtactgagcatttagcgctttttgtattcgtttatcgattgctgctctgcgttcttcactcaccacccagtcgcacatacagagcttgttctcgaaagaaccgagtatcaatttcccgcatggagattgatagtactgtatctgaactgtatttactttaccttttgcttctttctccattttgattctttatttaaagggtttgatatggatgtaaaagtaattatttgtattcaaactacaaaatgaataattcggcaatagaagcctgaaacaaaatcttttacccttacagtcgatttaaattgattgattacttgttctgccgtagaattattataattttgtagcagaactttttatttcgtagtatttgataaagaaccaaaccacatgaactataaaataacgactcttgtcgaaaattgtgtctatggacgtaaattgcaggcagaacatggtctttccctctatattgagacaccggaaaacagattactttttgatacgggagcttccgatttatttatccgtaacgcccggttattgaatattgacttgcaaaaagtagattatttagtattatctcatggtcacagtgaccatacgggtggactacgccattttcttgaactaaatgccgaagcaacggttgtctgcaaacgcgaagtgtttttttctaaattcaaggatgaacgtgagaatggaatgaaatatacacgctcgcttgatctttctcgttttcgttttattgatgagttgactgaactggttcccggagtatttctttttccctctgtggatattatagacccgaaggatacacattttgaacgattttggattcaaaaggaagatggttctagagtccccgatacctttccggacgagttagctatggtactggttgagcctgaaggactttccattttaagtgcctgttcccaccggggtattacaaatatattgcggactgtaagaacggcatttccggaactcccctgtaatttgcttttaggtggatttcatattcataatgcagaagaatccaaatatcaggttattgctgattatttgcacgaatatttacctcaaaagataggtgtctgtcattgtacgggagtagataaatatgctttcttctataaggattttggagacagaatattttataaccatacagggaaattgattcagacggattctctgttataataatctgcgacgactaaacaagaatatataaaaacaaactggatgaattttaaagactgcatagattcttatccctttatattaatggaaggtgctttaggcgagcgactaaaaagggagtttgatttggatatcagtggtactgttgcaatggctgacttagtctatcagcagaaaggtagactggcattagaaacgctatggaatgaatatattgatattgcatataggtatcaactaccatttcttgcaacaactccaacaagaagggccaataaagaacggatttatatggctggatacaatgaatccattattgcagataatgtggattttcttcgttccataaaagaagcagcaaatgtagatatgtatatcggtggtttgatgggatgtaagggagatgcatacactggcgaagaggctctaaatctggaagaggcaatagacttccatagttggcaggccggtttgtttaaatctgccaaagttgattttttatatgcaggtattatgcctgtattgacggaagctatcgggatggcagtcgctatgtctgatacggatattccttatattatcagctttacgattcaaagagacggaaaactgatagatgggcataccattgatgatgccatacattgcattgataatcatgtgtctaacaaacctgtgtgctatatgacaaattgtgttcatcctgatattgtttacgaagcactttctcataagttcaatcaaacacaaacggtaaaatctcgcttttggggtatacaagcaaatacttcccaattgtcatataaagaattggatggagcaaatcatttacatacttcttcggcagccgatctgagtgaagctattttaaagttgaaatctgattgtcatcttaaaatatttggtgggtgttgtggaacagacagcagtcacatggaaaaaatcgctaaaatatcggaagtgacttaaactaactagaaatacggtcttctcatgaaacaaggaatatagaataaatatataaacatacaataatatgaagaaaataatcatctctttagcgctggtactgactgcattatccagctatgctattacccctttgtggatgcgtgatgcacgtatctcaccggacggaaaggaaatcgtcttttgttataaaggcgacatttacaaagtccccgttcaagggggaaccgctacccaattaacaacacaagcttcttatgaggctaatcccgtctggtcgccagatggtaaacaaatcgcgtttgccagcgaccggaatgggaacttcgatctctttatcatgtctgccgatggaggaactgcacgtcggttgacttatcattctgcctcggagattccttcggctttcactccggatggtaaatttgtacttttctccgcctccattcaggaccctgcgcaaagtgccctttttcctaccggagccatgacggaattatataaagttccggttaccggaggacgtaccgaacaagtgttggctactcctgccgaatgggtatgctttgataaatcgggaaaaaacttcctttatcaggaccgtaaaggttttgaagatgaatggagaaaacaccatacctcatctataacaagagacgtttggctatacgatgcttcgaccggaaaacataccaatctgaccaatcgggaaggagaagaccgtaatccggtatatgcaccggatggtaattcggtctattttctaagtgagcgcaatggcggttcatttaatgtatataactttgccctgaacactccgcaggaagtgaaagccatcaccactttccgcacgcatccggtacgtttcttgtcaatcagcgataaaggaactttatgctatacgtatgacggagaactttatacacaagagcccaatgcccgcccgaagaaagtaaatgttgatcttgtgcgtgatgatgaaaaagagattgctactctcagattttctcagggtgcgacttctgcttctgtgtctccggatggcaagcaggtggcttttattgtgcgaggtgatgtttttgtgacttcaaccgattatgctacgaccaagcaaataacaaatactccggcaaaggaatccggtgtatcttttgctcccgacaaccgtacactggtttatgccagcgagcggaccggcaactggcaactttataccgctaagatagctcgtaaagaagaggcgaatttccctaacgccactcttattgaagaggaagtattgctcccctctaaaaccgtagaacgtgcttacccgcaatactctccggatggtaaggaattggcttttatcgaagaccgtagccggttgatggtactcaacctgaaaactaaaaaagtacgtcaggtgacagacggttctacatggtacaatacaggaggcggattcgactacgaatggtcgcccgatggcaagtggtttacgcttgagtttatcggcaatcgtcatgatccctattcggatatcggcattgtcagtgcgcagggaggtactatcactaatctgactaacagtggttatattagcggctctccacgttgggtactggatggaaatgccattctgttccagaccgaacgttatggtatgcgtgcccatgcttcctggggatcacaacaggatgtgatgctggtattcttgaatcaggatgcttacgaccgttaccgtttgagtaaagaggatttcgaactgctcaaagaatttgaaaaggagcagaagaaagcaaaggagaaagacggtgataagaaaaaggacggaagtcagtctaaaaaggaaaaggcagacaaagaaaaagataaggtagacaaagaaggagataaggaggataccgaaaaggacaaggcagacaagaaagatattgttgtggaactcagcggtattgaggaccgtattgtacgcctgactcctaactcttctgatttaggtagtgctattctttccaaagatggagaaaatctgtattatttctctgctttcgaagagggatatgacctttggaaaatgaatcttcgtgaaaaagggacgaagcgtctccataaacttaattccggctggtcatcactgatgctggataaaaaaggagatatcttcttgctgggaagcagaaatatgcagaaaatggacgcgaagtcggatgctctgaaatctatcagttatcaggctgaaatgaaaatggatttggcagccgaacgtgaggcaatgttcgatcatgtatataaacaacatcaaaaacgtttctacaatcttaatatgcacggagtggactggaatgccatgacagctgcctatcgtaaattcctgccacatattgataataactatgactttgcagaattactgagcgaatggttaggtgaactgaatgtttcgcataccggagggcgctattctccgaggggcaatggggatgtaacctctaatctgggcttattgtttgactggaattatcagggaaagggtatgcagattgctgaaatcgtagagaaagggccgttcgatcattcccgtaccaaagtaaaggcagggtgtattatagaaaagatcaacggggaggaaataactccggataaggacatcactgatcttttgaataataaggcagggaagaaaacactggtttcgctgtacaacccgcagaataaggaacgttgggaagaagtggtaaaacctgtcacaagcggacaacttaatggcttattatataaacgttgggtaaaacaacgtgctgaggatgtggagaaatggtccggcggtcgtttgggatacgttcatattcaatctatgggagatggaagtttccgtactgtttactcggatattctgggaaaatacaataactgtgacggaattgtgatcgatacccgttttaacggaggcggtcgtctgcatgaagatattgaaatacttttcagcggtcagaaatatttcactcaggtggtacgcggacgtgaagcctgtgatatgccaagtcgtcgttggaacaagccttctattatgttgcagtgtgaagccaattattcgaatgctcatggcaccccgtgggtgtacaagcatcagaatattggaaaactggtaggtatgcctgtcccgggaactatgacaagtgtgtcttgggaaactttgcaggatccttcattggtatttgggattcctatcatcggttatcgtctaccggatggcagttatctggaaaatactcagttggaacctgatatcaaggttgccaacagcccggaaactgtagtgaaaggagaggacacgcaactcaaaatggctgtggatgaattgcttaaagaaatagatagccggaagaaatagacatcctttcctcctttagaaaaaataattttagtctcactctgctctatttaaacttcttgcaatcagtggcataccgaatgaaagtgtgtcaaaagtaactaaactctcctccttcccgaaggaggagagtttagttacttttgacttttgacatacctacattgttttttgagttgtctctcacttttttcctcaatgcccgtccttctcgtgacaaagtaccttccatgagatgcgatttaccgcttctttgcctgtcacatactctgacttagtgtgtttaacaataggtgtttgtcttaccctggatttggttgactactataagtatcaactaaaatgaataaaagatgaaaaagagtgacatgacctttagtccttatcagcttgaacttcttggcgatttctatcgttcgaatttctcagtttctcgttttgcccaagaaaaagggattgcccgtattacattttggcgttgggttcgtatctttgaggattctaatcctgaaatatccgcttatatgaaaaagcacaagtctcccaagtcctcggaggaatcctcctcaattactgccttacgtcttgagaatgagcgtttacgtgcagagcttaaagatgctaaaatgcgtgcgcacgccttcgatacgatgattgatgttgccgaggagatgtttaatcttcctatccgaaaaaaagctggtaccaaacaataaaaaggctttgtaaagggaggcatgcctatacggtggtctctctttgcaaattgtttggtgtaacaaagcaagccttttataagtatgttgaccatagtacggatagttcggcccgtgaacgttttgttcttgagtttgtcaaacgtgtgcgttcaaaggaccctggtattggggggatgaaactttggctgatgtaccgtaatgagttcggcaccagccaggcctttgttgggcgtgactgtttctgtgctatattgtccaagtataagctgacaatacgcaaacgttttcgggctccacgtacgacagactcctctcatcacttgccacagtatcctgatttaaccaggacattgctattagaacatcctgatcagctgtgggttagtgatatcacttacattaccatatggttgcctgacggcagttatgtgttctgctacctgtctctggtgacagacgcctatacgaaggagatcattgggtattgcgtaggtgatactctgggaagctgttacacagtggaagctctggaaatggcagtcagacgcatagctgcaaaggagattaagggtttgatccatcactccgaccgaggcgtacaatatgccagtgcggattatattgccatattacgacataacgggattcttcccagcatgacagaggatggcaatcccaaggacaatgccatagctgagcgtgtgaatggcattataaagaatgaattgctgcaaggaatgcgctttagttcaatacaggaagtcagaaaagctgtagcaacagccgttcacttctataacaacgaaaggcctcatatgagcttggatatgcttaccccggtacaggcaggagaaatgcaaggacctatcaggaaaagatggataagctacagagaaaagtatctgaatgtagcacttgcttaaaaataaatatgtacatttgcttatgaaaagaccaagaatgccctgctagcgggatagaaagaggaaaaagggtgagttcctttcttttttcttctttcaaagagaagagtcaaccggttaaaggaataagaaaaaaataagtaaaccggaggcaggaataataaataataaagtaaacagctgccagggttagtaatatttctagtcaacacatagcagctattagagataaacaagtcaaccattattagggaagtacagttcgtgttttatttcaccggcatcttcattgttccactcgggtgaacagtacttattacccgggtgaacggttcagttcactccggtgcaatgatcagtctacccgggtggaacgatgaagatgtcggtgagataacgcaatgatgtatataggataacgtatgggatacagtgacttaacatacaaacaacagatggctttaaacagatatagcgaactacatctaatgtactcactgtgatgtatccaaacatccctcgaagtaccaacttatttttaagcattactatatagtcaggcagatggaaacgttgctggtagtgagctggagaaaacttatttcaatacaggtaataatttgtagagagtcttccttgtcattattttctgattcaggaaactgacgatatatccggtgatgcaggcggcgataagagacccctcgcgaacaccttcgatgcattgcgaaagcaggagagagagtatgactgccagagtgaccagcgtaacatcaaaacagactttgaactttccgaactctttgttataacggcgggaggcgtattttacgaaagcctctgcgctcatcattgctactttgggtttgagttcgagtacgactcctatggattgtatcatgcatcctgtgagtaataaggctattgatatcccgtaattgtcgggatgcagattactggtgagtgccatattaaaatcaatgaatgctgaaaagataaaagagaacggcaattgaagaagtatttcaatggtgtcctgtcgggtcttattttttctgatgatccagaactgtcccagaataagcagcatattgatcagaaacgtacaagttcctaatgataaagggctgtttaggcttaacacataattgatgctggatataggtgtggttcctaatgcggaacgtacaatcaacactattccggcagccagaaaatacaatccgataacaaataccaaataccttttaaaaacgtctttcattcccatatcttatctatcttatataatcgtattgttcttcattctataaagaagaatatgcaaaggtcccgtttttttgtctgatataagttatccgattccacacagtttttgtcatatccgaaacaaattgtacttttacgtcgaaaagaaggaggtataaatggtaaaatctcgtatttttgataataagcagttattaaaggaacatccggaaattcctcattataaagaggaggtagtctgctttatgagtgaatataaggacaggagctatccggaaaacgaacgttactttaatcgtgaactttatatgatactcgttcttgaaggtcgttccgagattttgttgaatggggaatttattgtgatagagcctgatatgttgcttgttcatggagcgaattatctcaccgaccatctttattcgagtccggatattaagtttatcaccctctccatttccgagtccatgcggacagatgactcttatcttacccagataacggctattctgttggcaacgatgaggcagaataagcaatataccatacagctgacagcatacgaagctcaaatcattcgtaatgaactggaagtgttgatgcatttgctgaatataaaacatcagtttcttttccggcgaatacaggcggcttgcaatgccttatttttggatatagccgattttctttcccgaaagaccatcataaaaaaggaggtcagtcgtaaagaccatgttttacaggaatttcatgcgcttgttacccgaaacttcagagaagagcatttcgttagtttctatgcggataagctggccatcagtgagcagtaccttgcgcgtatcgttcgtgccggaacgggaaaaagtgtgaatacgattattaatgagttattgatcatggaagcccgaaccttgctgagttccactaaatctacggtaggggatattgcttctcagttgggctttagcgatgctgccggtttctgtaagtttttcaagagaaatatggggcagactcctctcaattatcggaagggattatggatttaagtgaaaatgaatgcaggttgatgtgatcccataacgaacggatacatcaacctacatgaaatatataatgaactggttttgacttatcagccaatgagtgataggatatcttctacgatctgttcatccgtcagatggttggcacgaagcagttcctgtatatcataacggtctacaaattcttttttagctccatagttgagcacttttatatctgtagcgccatagtaacgggcaatcttttcaccgaaaccaccatccagaactccgtcttccagtgtaatcactaattcgtggtcggctttcagttcgtccatcagttcgctgtctacacctgtgatgtagcggggattgataagggtggcatcaatgttggctttatctttcagcaatgacagaaccgattgccctaatccgaagaaggagcctaatgcaagaattgctactttggagccgcggtgggcgactttataacgattgagattgctatagtcggattccaccggttcaccgcaactgattacatctgtggcaggtacacggatagctaccggatgctcattttggcggatgctccattccagcatggctagatattcctctttacaggttggtgccagatagaccatattggggatattgctgataagtggaatatcgaagaaacagaggtgggttacatcattcataccggataacgtcccccagaataccaacagaactgccggattattattgatgcagagatcttgcgagagctggtcgtaagagcgttgtataaaggtgctgtacactccgtaaaccggttttccgccattggctgcgataccggaagcaagtgccactgcatgctcttcggcaataccgacatctacaaactgcttgcctgcttcctgacgacggtcgggagtgaagcccagaacagcgggggtgcccgaagtaatggtaactacacgcttgtcttctttcatctttttcagcagatattgagcggttacttcactataatcttctgcgtcgtcgttcatttttgattctccggtttctagatcaaacggagtacgccagtgataggtctccttgtcctgttctgcaggctcgtaacctttgccttttaatgtattgatgtggactactatcggatgctgtatatctttaactttggagaaagcctcgatcagtgcttccacatggttgccgtcattcacgtacatatagtccagccccatcgctttgaagaagttgcattcacattgaccgttactgtcgcgcaaatctttcagattcttgtataaacctccgtgattttcggcaatggacatctggttgtcattgacaataataatcatgttagttccgagttctgctacgtagtccagtccctcgaaggcttcgcctccgcttagtgaaccgtcgcctattacagcgatgatattttcgttgccacctgtcaggtcacgtccttttgccagtccgcttgccaagctgatcgaagtagaagtatgaccgatcacaaagaaatcatgttcactttcctgtggttctgagtagccggatacatggtcatattcagcaggatggagaaaagcatctttacgtccggtcagcatcttatgtacgtaactctgatgtgatacatcatatacaattttatctttcggtgaattgaaaacatagtgcagggcaatggtcgcttctaccattccgaagttagggccgaagtgcccgccatgttcactcagtttttgtaagagggatgcacggatttcgtgacttaaatcattcagttcctgaaacgataacttctttacgtctgcgggagagtaaatattttctaaatacatatcaaattgtttttttatgtttatacctatatttttatttcactgcaaagatactgccggatttgaaatctgtttgtatatgaattacggattctttttacctatattacagttccgctaaaaatgggcttgataaaacataaaatatgacttcctctatatcaaccatgtgctcttttgcaagcttgattcttttctcctgaatatactttggataaggtatcacgcacgcgtaatcattatatataatagtatatactcttatgtgcggcaaaaagataaaaccgataatccgtaattggggtaataatgtcagtaattcatctacaaacactctctttatttcaccgtatttttgcaatgtagaaagtagacaatcaattcattaataattaaatgtaagagatatgaaacgaatattattattaaccgctgtatttattatgatgcttggaaccagtttttctttcgcacaggctgatgcggataacttttataaaagtgattgggtaaaggtagaaaaggtttctttttctaaccagtataaaatgaaagtagccggcaacctgtttttgccgaagaccatgaaagagggagagaaatatcctgccattattgtcggacatccgatgggagcggtcaaggaacagagtgcgaacctgtacgctaccaaaatggcggagcgtggttttgtaacgctgtccatcgacttgtctttttggggtgcaagtgaaggtgagccgcgcaatgctgttttgccggaggtatatgcggaggatttcagtgccgcagtagattttctgggtacacgtccgttcatcgaccggaataatataggtgtaatcggaatttgtggcagcggaagtttcgctatcagtgcggtcaagatagaccctcgtctgaaagcgattgcaaccatcagcatgtacaatatgggtacagccagtcgtaacggactgaaacatgcgctgactctggaacaacggaaacaaatcatggctgaggcagcagaacagcgctatgcagagtttttgggcggagaaactaaatataccggtggcactgtacacgaagtgacagaaaactccggtccgatagaacgcgaattttatgagttctaccgcactcagaggggagagtttacttccgaaggagcaaccccgatgactaccacacatcctacgctttcgagcaatgtgaaattcatgaatttctatcctttcgcagatattgagactatttcgccccgtcctatgcttttcataaccggagaaaatgcccactcacgcgaatttagtgaagatgcctaccgactggctgctgagcccaaagaactgtacattgtacccggtgcaggtcatgtagacctttacgaccgtgtgggtcttataccattcgataaattggaatccttttttaaggaatatctgaaaaaataagcatgaacaggaaaaacagataactatttaaataaaagacaatcgaatcatgaaacaaattaaaaatacacattacgaaggcgaacgtcctttgttcgcatcccacgggctttatctggaagaagtaaccattcatgccggcgaatcggcattgaaagagtgtagtgatatagaagcggtaaactgtcgtttcgagggaaaatatccgttttggcacaatgatggttttgtagttaaaaattgcctttttaccgaaggagcacgtgccgcactctggtactccagaaatctgaagatgaaggatacattagtggaagcaccgaagatgtttcgcgaaatggacggagtcgaactcgaaaatgtacagttgcccaatgctttggaaacactctggtattgccggaatgtggaactgaacaatgtgaagatagataaaggagactatctctttatacacggagaagacatccgcatcaagaattttgtattgaatggtaattactccttccaatattgcaagaacgtagaaatccgtcatgctgaaatccattcgaaggatgcattttggaatacggagaatgtgacagtctacgattctgtgctggacggagaatatctgggatggcattctaaaaacttacgtttggtgaactgcaaaatttcgggtacacaaccgctttgctacgcacacgacctgataatggaaaattgcacgatggcggatgatgcagaccttgctttcgaacacagtagtgtgaaggcaacgattaaaggcccggttcacagcgtgaagaatccccgtacgggaaacattgttgccgaaagtttcgggacaatcatcttggacgagaacctcaaagctccgggaaactgcgaattgaaactttgggacggactgacttgttttgattgaaatatatgaagtacaacttcgatgaaattgttccgcgcagaggtacaaattcctataaatgggattctgccggagatgcggatgtattaccaatgtgggtagctgatatggatttccgtacagctccctctgtggtggaagcgttgaaaaggcgggtggaacatggtatcttcggatatgtgcgtgtgcccgatacttactatgaggcgataacaggatggtttgccggacgtcatggctggcagattgaaaaagaatggattatttatacgactggagtagtaccggccctgtcagttgtcatcaaggcgctgacaactcccggagataaagtaatcgtgcagacacctgtctataactgctttttctcctccatccgcaataacggatgcgaggttgccgccaatccattgatttacacagacggaacttatcagatggactttattgatttggaacgaaaggcggctgacccgagtgtaaaagtcctgctattatgcaatccgcacaatcctgccggaagagtctggacaaagcaggaactgactcgcttgggggaaatctgccttcggaataatgtatgggtagtagcagacgagattcattgcgaacttgtctttccgggacatacttatatcccttttgcatctgtctcagaagagtttctgatgcattccgttacttgcacctcgcctagtaaagcctttaatctggcggggcttcagattgccaatattgtttctgccgacgctgatatccgtatgaaaataaacaaagcaatcaatataaatgaagtctgtgatgtaaacccgtttggcgttgaagccttgatagctgcctacaatgacggggaagaatggctggaagaacttaaccaatacctgtttgccaactaccattgtttaagggcttactttgataaatatcttcccgaatttccggtgatgccattggaaggcacctacttggtatgggtagattgctcgactttgaaacaatcgtcggaggatatagtgaaaactctgctggagaaggaaaaactttgggtgaacgaaggcaatctgtatggagaagctggtgaaggattcgtccgcatcaatatcgcttgtccgcggcaacggctgatagaaggactgaacagaatgaggcgggcgttatcatcgcctattacctcattcacctaaccaagatagcgtttcagggttgcagacgaaatttattgggagtcatcccgacaatccgtttgaacatccgactaaggtgctgtggatactggaatccgatttcgtaagcaatctggctggtggtcttgtccgtagacaacagctgctccttcactaatccgatcattttatcctgaatatattcagagacggttttaccggtctgtttacgtaccatgtcactgaaatagttagcggaaaggaatactttatcagcgaagtacttgaccgatggcaacccttgtttttgcggggcatctccttcgaaatattcgttgagcagatgttcgaagcggacaatgatgtctttatttactccgtttcgtgtgtcgaactggcgttcgtaaaagcgcatacagtagtcgagcagcaatcctatgttggcgcagatcagtcggcggctgtgtttgtcgatggaatgttccagttcgatggtgattttttgcaggcagtccatcactgtttgccgctcttcttcggaaatatggagtgcttcgttgatttcgtaggagaagaaggagtatttctttatttcttgtccgagcgcagtgccacgtataaggtcgggatgaaaaagaataccatgcgcgttgggctgaatatttggcagcatttccaggtcagtgatttgtccgggagcaaaacagacgatagttccgtcttggtagtcgtaatattggcgtccatatttaatatcaccacattttacatttttcaagtatagtgcatacacttcgtaacgaaaccacgcacgtgtgggccacgtagtggatttggccagatcgatgatgctgactaacggatgtctggtttcaagcccgaagatttcgttgtaacggtcaacgctgtctattacaatcatttctttagtattctcttccatatcacaatctggtttttttaatgcgttacaaatataattcttttctctttaaaatttttactctcccatcaaaatccatgattggggtataaatatccgtaaatcgtctacatccgggctggaccatacctcgtaactttgtaaccggtaatttaacattgaaaagagatagtaatatgaaaaagattctattaattccattgatgatgctgacgatgatgccgatggcggcttgcgacggctcaaacgctgatccgattcttccggagcagccgggacaaccgggaaattccgacggtggagacgaggatgattctacagacccgacaaaccccattccgggtggtaacgggcgatatctggtactttactgttcgcgtaccggtagcacggagcgtatggcgcaacagattcagcaaacactcgattgcgatatcctggaagtggaaccgcaaacaccttatgaaagcgattataatgggatgctcaaccgtgcacaggaagaactggctgctatccgtcaggggaattatccggcaattaaaacttcggttgaagattttggcaactatgatatcgtgtttgtcggctatccgatttggtacggtagcatggccacaccgatgcagacattcctgcataatcatgcttcgaaacttgcaggtaagcgtatcgctctttttgccagcagtggcagcagcggcatctctgcatcagttgacgaggcgcggacgctttgctccggtgctactttcactgaaacactgcttctgacttcttcgacgctttcgcagatgggaaaccggatacggacatggctcgaaacactcggtgcgagtcgggaaaacaattatccgtctacttctatgaatgtgaagattacagtcggtaaccgtaccattactgctacgatggaagacaatgccgcagcgcaggactttctttcgcgtctgccgcttgaagtgatgctgaatgattataataatatcacagagaaaattttctatccgtcgcctgcactgacgacggcaggagtgacccgtggctgtgcgcctgtccccggtgatattacaatctatgtgccgtggaataatgtggcgatcttctgtaaaagcgggtcgcaaagcaatgacttgataaagattgggcgcattgacggtgatggaatagatgcattgaacgttccgggcaatgtggcagtgaaattcgaacgacaatcatgattgatgctacgccactcattcccggactgaagatgaagtaaatgacaggcagtactataaatccgtaattttggtttttatatccgtaatttgtattataaagagttggatcagaacagctaattttgcattatcggcgagttcttaaatagtaaaccatagacgtcacagtatgagagaattatattttatttttgtaacagtcatcggatttctgcaaatcccgatgcaatctataaatgcacagagtatgaaaaaagaagaagtacctcagaacatcagcgcatttccgttaggaaaggaaaatatgggattcaagcaatattttacaggagaatcctggctagcaccgctgaccagtaacaaagacttgaatgtacccatgtccaacgttacttttgaacccggctgccgaaataactggcacagccatacgggcggacaaatcctcattgctgtcggaggtgtgggatattatcaggaacgtggcaaagcggcacgtcgactgctccccggtgatgtggttgaaatagcaccggacatagaacattggcacggtgctgctcccgatagttggttttcgcatctggctatcggctgtaatccgcagaccaacaagaatatttggctggaacaggtagacgaccagcagtatgccgaagctacgaaagataacggaggaaccggactaagcgctaccgacctcgaactggatgcaatattcggtaatttcacaaaggaggtgcagcaatacggcaacctggatactaaaacccgccttatggtaacattggcatccaatattgcttcacaggcacagaccgaataccggatgatgcttgaaagcgctctcaatgcaggtattactccgatagaaataaaggaaatcctttaccaggcagtagcctatgcaggcatggctaaagtgatggactttgtcggcatcactaatgaggtgctgcttgcccacggtgtacgtctacctttagagggacaagcggtcgtttctgccgaaacccgtttcgacaaaggactggcattgcagaaatccattttcggcgaacggatagaccaaatgcataaaaacgctcccgaaaaccaaaagcatatccagcgttatctctccgccaactgcttcggagactaccagacacgcggtggactggacgtgaagacacgggaactgctgacgttctccatccttgtttccttgggaggctgtgaatcacaggtgaaagggcacatacagggaaatgtcaatgtaggtaataataaagatactttgctggctgtcgtgacgcagctcttgccttacattggctatccacgtactctcaatgccatagcttgtttgaatgaagtgattccggaagataaatgaatttaaaataaggaaatacatgcgtgatatatatactgaccgaactgttggatggggggggatttatatatattaactatgttctgtttttaagatttttattgggcgaatctgatatcttttaaagtcagatagagagagtactgcataaaattatgaataaatatctagtttaaagctctactagtgcaaggaaattgattatttatgcataataactagcagtgtttgtgtctgtttcttttaaaggaacacttcgttcctttaaaagaaacggaatgttggtcggtgaggaagctactaaacctttaaaaggagtgaatgaatttctattttatctgtatagattccctggtttactttattttatgaaaggaaaggaactgttaatttgaatagattatattcctttttgtaaccattctaaatgaatttgaactaaaattgtttcctattgaaggataaagcttaatataactattctttgaatacttctaaaataaaaatcctgccgttttctgtatctatcattaggctttcttgcatattttgcataagaaacaagttagatggtcgttatttcatatatgtgctgttttttagattttaagactgtaaaatagatgttaatgcaaaactaaaactacgaactatttttttataggatatgttttttttgagtgaatagcaaacaaaacttcacataaatatttttaattatgaaaagaactattattttattagcttgtgcattaggtatatttactgcaaatgctcaatcggtggtagaaagtactaaatttacagataactggtctgtaggaatcaatgctggtgcgattacacctctcactcacagtgcttttttcaagagtatgcgccctgcttttggagtagggttctctaaacagttaacacctaatttcggtttgggatttcaaggtatggggtatgttaatactacccgtagtaagacagcttttgatgtttctgatgtaagtttattgggaaaggtcaatctgatgaatttgtttggaagctatttgggtactccgcgtgtctttgaaatagaagctgtagccggaatgggttggttacattattatgcaagcggcgatggagatcagaactcctggtccacccgttttggaatgaattttaattttaaccttggagaaagtaaggcctggacccttggacttcaaccagctatcgtgtacgatatgcaaggtgattttaatagagcaaaaagtcgtttcaatgttaatagtgcggcttttgaaataacagccgggctgacttatcatttcaaaacaagtaacggaaaccattacttcaccaaagtgaaagtttataatcaggcagaaattgatgatctgaattcttctatcaatgccctacgcggtgaagtgaataataaaaacagtgaactgaataatgctgtccaaagaatcagtggattgcagcgtgatctggaagattgccgcacaaagactgttcccgctgctgtggtaaagacaagcagggttccggaatctatcattacctttagacaaggccgctcggtggtagatgcttcgcaacttccgaatgtggaacgtgtagcttcttatatgaagaaacatcctgatacaagagtcgttatcaaaggatatgcttctccagaaggtagtatagaagtaaatgatagaatagcaaaagcgcgtgccgaggctgtgaagaatattttagtcaagaaatataagattaatatagaccgcataacggccgaaggccaaggagtaggcgatatgttcactgaaccggattggaatcgtgtaagtatctgtactatcgaagattaatgacttagaagttctcttttcaattaaataaattattaacttaatacctgaattatgaaaaagttattattatcagtaatggttgcacttgcagctttaggaatgaatgctcagacaaaaaagggagaaggttcgttgatgggaagtcttggatatcaaaccaattatgaaaggttcggtttgcaggcacagggacgttatgtgatagctgacaatcttcggattgcgcctgatctcacatttttctttccgaaagataaagtgacgggattggatgtaaatgtaaactttcattatgtcttcaatttcagtaaagacgggcaaggattctctgtatatccgcttgcgggaataggcatgcagaataatttctatggaaaacagaaagtagaagttgacggtgtgactaccgaattagatagaagcaatactacaaagtttgctttcaatctcggaggcggtattacgttacctttatcagaacgtagttatttaaatgcagaggcgaaattcatgtttgccaacgatgataatgtcgtcatcatgttgggttatggttataaattttgattcttgatgtgtgccggacagctttttggtgctgtccggcatattaaaatatagatgtacatctcaaccaacctgaattattaactttaaaatgaatcaattatgttttatcatgtaaaagatttgcaattcaatgcccgcgtatccaaaccggacccgcgttttgcccgtatattgctcgaagcattcggcggtgctaacggtgaattaacctcagccatgcaatattttgtacaggcttttagttgtcataatccgtttcctgataagtatgatatgcttatggatatcgctacggaagaattgacgcatctcgaaatagtaggagctaccatacaaatgcttcttgggccggtaaacggtaagatgaaggatgctgtcgaaacaatggagattagtaaattaatggaaggtaaatctgcaaaagaggaatatatccatcaggcatttaccaatccccaatgtgtagttgttgctcccggaagtcctatgctgacagatagtaacgggaacccctggtgtgctacttatgtgtctgctaatgcggaacttacggtagatctgcagtctaatatggccaatgagtgtcgtgctaaaataggatatgaaaatctgctttcgtttacagaggatccatttgtcaaagaaactcttactttccttatgacacgtgaaattactcattttcagcagtttgaggctgctctgtcaactatccagcccaacttcccgcccggttctttacaaacttcacctaaatatagtaatctttattttaacttgtcaaaaggtgaagattcccgtggcccttggaatgaaggcgagagcacgagactaaaagaagaatggcaatatattgatgatccattgcaagaagtaagaagaacgaatggattggtggacagaaagccggaaggtactgagcgtaccgaaaagcaagtgcgtacaatggacgaaaagttagcgaaagagcgtagcagtcaagttctgtcggcaactcctgataaaaatttgacatggtgtaattaccagaaatctacatcttttgataaaaagtcggataagaaataaaatcaccatttcttaaatgaatccttaatataattcccggtcgaagaattcgaggatgtcttttgccgggaatttaaagtttctacataatataacaatttaatctagaatatatgagaaaattattatttatagcttgggtgatggtatgtgctgtaaccttggcgatgacatcttgcagagataaaaagactcaggataaggtcaacaaccgtgttgagaatgtgaaaaaatctacagacagggcacttgatagagcctctgataagttggaagcaggaacggatagtgtgaaaaaagcctggaaagaaacaaaagaggatgtaaaagaaggggcacagaaagttaagaaagaagtaaaagaaggatataataatgtcaaagatgaagtaaaaaagaaattggattaaccagtttcacttcatgtctatgctatggaatatggttatttttgttgtgtataatcagagggtgttgtgaaagtcactctgtttctgtagatgaattgatttttgcgcaccctcataccttatttaggtttccagtttatatagctccaacttgaattggtttaaataccagcaattcccatcacatgtttttttgtaaagagctccgaaaattgtccggctcatacatctgttgccaaacagattactacaacgtaatctgtatgcttcaatagcgagtgatctttctaccatacgccctttagtatatgcatccgaacacattctttgtatatcatcataatcaggatgatcaataagaaataaaatgtcattattttccatatttatatattttaaaagtcttatatttagtaaaacatcttgtttgtaatagaagtttgtcagaagaatataatcattcttaaaatcgtaacaatttagttgaatcatattcagaaagttatgaaagtgtgatataaaacgaaatatgtgttaaacgcaagtgcaaaagtagaactaaatgatactgaatggtgttatttttttaatgaatgacaatgtttatagttgaatgaaaaacaagatcgaaattagtgggatgcttcaattgcttatttcttggtttataaactaaatagacaatgtcttttgttagagaaaaatatgaaccttttttgaaatgtaaatataaacctaaattttaaacattatgagtgtaatttggtacattattattggaatcgtttctggttttatagctgggaagattatgagaggaggaggcttcggtctcttgattaaccttcttgtaggtatcattggtggtctcttgggaggctgggtattcggactgctggggattgcaaccggtggtattctgggtagtcttattacttcagttgttggtgctgtattgcttttatggattgtatctttattcagaaggcatccaaacgaagggtgaaaaactttaatttattaattatttaaactaaaacttgattatggaaagaggaaaatctaattttattatcgggctgggagtaggctcggtaattggagcgatcgtttatcatttttggtgttctcctaaggggaagaaaatgaaagaaaaagtaaatcatgcctttcagaaagttactggtgaaggtattaatatgattgatacagtgaatgataaagtgttggatgctggagttgaagtagcggataaggtagctgacggtacctttcatattgcagaaaaagcagatgatgtcagaaacaaagttcatactttctcggataaagcaaaaaaatagctaggtgtttgttgttcaaaagtggggggacagtgtaaatgatagctgttctcccctttttgccattaacgatcagagagagaagaaatttaatttatatgtttaaccgttaacacaattaattatgaaaaccggtagttttaatttatggatcagattgacactggggtcagcaataggagcgcttatttatcatctctcgccagaatctaaaacaaagaaattacggaaaatggtgcgtgctaggcagcataaaagggaaaataatgtaaaaagtgaaatttatacactttctgccgatgcccggaagtaagtaattaatcgtttgtcactaagtccggcagtattctgttgccggaacttggtgacactaccccccccggccgccctatgtaagggatttcttttcttcgtgtatctctatgattttagttgccaccgcatattcgtctgggaaaatctttcctcccaattcattcgcccaagccttggtaaactctgcacctgtatatataataatggcagagtagtaaatccatatgacgaaaatagccatgaatgccgcagctccgtagactgtttcaatgtttgcaatagctatatagaacgatattccccactgacctgccagtaatagtacagtagttacgagtgctccgataaaaacgtctttgcttttaatttttgcatcgggtagtattttaaagattagtgtgaatatgatagttgtgactactaaattgacaaatatacctataactttaactaatgattcggctacatccggattgttggcaatgtatctgttgctcaaatctgtgataaggttagttatggtaaatgtgattaataaaatgaaagcaaatacaaggatcacagaaaaagagagtaatcggtttttaatatatttaagccaacttttccggggaactgcctttatgccccaaatagtattcagtgaactctgaatttctgcaaagacagtggttgcactaaatatagtaactccaacgctaattatggttgcaaacgaagatacgtctgcttctgccgcattttcgatgatagatcggagtgcttcgataacttttggccctacaaccggttctatctgagtatataattgatcagttagatcaatctgaagaaaaactccaatagtaattaatagagaaaataatggaatgatagaaaacagggtagcgtatgccaatgatgcacttaatctcattacattgtcatcaataaatccttgaaccgtatcttttattattttaaaggctaaggatagtttttgtttacttgtagataaggtattcatttttcttgtttttattgtcttaacgaatggatttaattatttgttcgaatggagacgctgttgttgatcataggttctatgagacttttaaatatcaaatagttgttaattcagatagatagtcgtgaactaatatttgatatagtatgttgtttaaagtgaataacaaaataaattataaactaaaaaattaggcatgagcagataaaacatttctaatgatttagcaaatggaacattacaatttaaaacgtatgattatgaagaaatctattattttattagctatggtattgggtgcatttacagcaaatgctcaatccgttgtagaaggtacaaaacttacagataattggtctgtagaagtaaatgccggtgcaatcactcctcttactcacagcgctttctttaagaatgcacgccccggatttggaattggggtttcaaaacaattgactcctatttttggtttaggattgcagggaatgggatatattaatactacttcaagtaaaacggcttttgatgcttcagacattagtctgttgggtaaagtaaacttgatgaacttatttgcaggttataatggcactcctcgtttgtttgaggtagaggctgtagctggagcgggctggctacattattatgtgaatggtgatggcgaccaaaactcatggtcaactcgttttggattgaatttgaactttaatctaggcgaaagcaaggcctggacgttgggactgaaacctgccatcgtatatgatatgcaaggggatttcaaccaggcaaaaagccgtttcaatgccaataatgcagcatttgaactgactgccggactgacttatcacttcaagagcagtacaggaaaccgttacttcaccgaagtaagagtttacaatcagggtgaaatcgacgatttgaatgcttctatcaatgctctccgcggacaagtgaacaataaggacggcgaactcaacagcgccaaccaaaaaatcagcggattgcagcaagaactggaagaatgccgtaccaaggtcgttccggtggagactgtagtgaaaactgcccgtgttcctgaatctatcattactttcagacagggtaaatcatcggttgatgcttcacagttgccgaatgtggaacgcgtagcttcttatctgaagaaatatgctgatgcaaaagtagtcatcaaggggtatgcttctccggaaggtagtgctgaagtcaatgcaagaattgccgctgcacgtgcggaagccgtaaagactattctggtcaataaatacaagatcaatgcttctcgtatcactgccgaaggtcagggcgtaggtgacatgtttaccgaaccggattggaatcgtgtaagtatatgtacgattgaagactaaaaacaagagatgtaaatagaatggtgagggctgctccgtaaaagggcagcccttgctgtatatattcatttatgcccttctgtttgtgaataagtaatagtaatatctgtcgtccagacaggaggtgatagcagaaaatcgggcaaagtcattgtttgtctgtctaaagtgactacttttggcaaaccatactattaaggtatggccgaagatgatgaaagagcagaatataccccaagacagtttgatagccggctatcttccggcagattattgcgattctttttcaaggaacgtagtcagtgaaaaagcaatcacttccgacgagttctttgatatggcttttaatcactctccgggctgggtgaatgggttgatgaagttaaggaatgcgatagtcaaaccgttaggtctggaagttggtatgcgctttgccgatacgatatgtgagcagaatgcacaggaagttgttttcggtatgcccgataaacacctgacgtttcatgcttcattatggtgtggagagaaggagcccggcgggcagacgtttacaatcacgaccgttgtaaagttcaataaccgactgggccggttgtacttcttctttattcgtccttttcataaagtcatcatccgttctatgctgaaaagggtagcaaaacgattgaaataaaacagcttatggatataaatgatatcatagactctatttacaagttgccggatgcctcaaaggaggctttactgagtgatgctcccgaagtagcctatcctaaaggcttccatctgttccgggcaaatcataaaaactctaagttctatctgatgaagaaagggatgctgcatgcctatacctatcagtcggataagaaggttaccttctggttcgggaaagaaggggatgcaatcttccctctgcaaactcttcatgataatcgggcaggatatgagaatattgaacttttggaagacagtgtcctgtatgaactcagtgtcgataaattgcacaatctctatctggaagatatacatatagccaactggggacggaagttttccgagagagaatgcatcaaatcggaaaagttgtttatatcaaggcaattcaaaacttcattggagaggtatcaggaactgatatccgaatatcccgatatacttcaacgtgtgccattgggtattatagcttcctatttaggcatctcacaggtcaatctaagcagaatccgtgcgaagataagatgattttttaaactttgtaaaatcccttttttacaaatgtaaaatgaagggcgccggaaattcatgacctttgcaatcaaaaaaaagaagtgttatgaattggattcttttgattttggcaggatgccttgaattggtctttactttctgtctgggaaaaataaacagagtagtaggagcagagaaatatatgtggtcattcggactgctgatatccctgtgtgtcagtatgctccttctgataagggttaccaaagcattgcccgttggtacggcttatgctatatggaccggtatcggtgccgccggtacggtgctgatcggtatctttttctttaaagagccggcaagctggggcagaattttcttcatcttcacattgatttgctccattgtaggtctgaaattggtatcacattgataccttatggtatcataaaaaaataattatcgattataatttggtagttatgaaaacaaagcccatatttgcaccccaaaaatagggacaggcatagaaaatcctcatcggagggtgctataatagataattatagtgctggataagatgaatggtgtgaatcattcagcttgtccggcacttttttattttgtaacaagtaagataagaggagtaagtattgaaaaactatgaaggagttaaatttgacacaagggagtgttccgaaagtattactgcaatttgcggttccttttctgattgccaatgtgcttcaggcactttatggcggggccgacctttttgtggtgggacaatacgatgattctgcaagtgtggcggctgtagccatcggcagtcaggtgatgcagacaatcacggggattattcttggcattacgacaggaacaaccgttttgattgccatcgctaccggagcaaaggatgacaagaaagtagctttcaccatcggttcgtctgtatggttgttttcaataatcggggtgctgcttactttggtcatggtggtttttcatggtcggatagcagagttaatgcatacgccgatagaggcgatggcggatacgaaaagttacatccttgtatgttcggccgggatattgtttatagtaggatataacgtcgtatgcggtattttgcgcgggttgggagactccaagacgccgctttattttgtagcgctggcgtgtgtgattaatattgtactcgattttatactggtaggatatttccatttgggagccacaggagcggcagttgccaccataacggcgcagggagtcagcttcatgatctctctttggttcttatatcggcacggatttcattttgagtttacccggaaagatatccggctgaaccggaacctggccaagaaagtcatgacattgggagcgcctattgcgttgcaggatgcgctgatcaatatctcgtttctgatcatcaccgttatagtcaatcagatgggagtgatcgcatcggcttctttgggtgtcgtagagaaaattatagtgtttgccatgctgcctccgatggcaatctcatcggcagtagcgacgatgacggcacagaactacggagccggacttatacaacggatgaaccgctgtctggcttcggggataggaattgcatttgttttcggtgtatcggtttgtgtgtattcacaattcctgccggaaacgcttaccgcgttctttaccaaagatgcggcggtggtatcaatggcggcggagtatctgcggggatatagtatcgactgtatcgttgtaagttttgtgttctgtataaactcttacttcagcggacagggaaattcattgttcccgatgattcacagtctgatagcgactttcctgttccggattccgttgtcgtactggtttagtcagatagacagttcttccttgtttatcatgggctttgcaccacctctttcaacagtggtttcattgttgatctgtatctggtatttaagatatacccggaagaaagtttatttgaaaggcaccatgatgcctgctatgtcgaattaggtgttttaagtggatatattaactaaaatcaatttgtatggaagcttatttgaagaaactctgttttgagtatcaggttgaagaaaaggaagtgaaagagctgttggctcgcatggaaagagtgtatctggataaaggagaaacgattgcttctgctacaatgcccgagcagagcttgtacattatcgtttccggtatcctgcatacatttactacccagcagggagaggacaaaaccgtcagattcctgtccgaaggtgacgctatattgtgctacaatacaagtaagcattctgtcaaaacactgacaaggtgtgtggcctattacatcagcgaagatgagatcgaggaattgtgtgcaacgtccatcacgttttccaatctgattcgtcagatgatggaatatcagttttaccttaaagaggaaatgagtgtgaatgcacgtaaactgacgatcagggaaagatacctttctttattatcagaaattcccgatattctgtacagagtccctttgaagtacattacttattatttaggggccgatgtgacaagtctgggatatctggccggaagctgtaaataagaaatgtctcattctctatatttgaagatattccttgttgaatagtctattcttaccccggtgcttctcaaaaccggaaagtctttggatcatttgataaggaatattatttttgtaattgaaatgaaaaatctgattccccgatatactttctataagaataagtatggaagtgaacttttgatagatgtcgtcgaactgaaatacgtaaagaagttcctctctcagagttctgtccacacgctgacttactatgatatcacgtttgtcacagaaggggagggcaagttttcgatagataatcagactaacgaggcggcttcccgtgatgtgtttttctctaaaccgggagagattcggaactgggatacccgccacatagtcaatggttatgctttgatctttgaagatgagtttttatcttctctttttaaggattctctctttgtgcagcatctttcattcttccagtcgggaaagacatcatccaaattacagttgccggatgaactttatatgcgtatccttcagatattgcacaatattaaaacggagattgattcgtacagacagaatgatgtgtatgtattaagggcattactttatgaagtcctgatgttgttggaccgggaatataagaaagtgaatatggaagaagaaactacatccaaagaggttggtaatatccatattgacaaatttatgaagttggttgagagccatctgaaagagcagcattctgttcaatattatgcggataaactttgtattaccccgaattatctgaatgagattgtaacctctacaaaagggattagtgcgaagcaatatatccggaataaagtaatggatgaggctaagagactgcttacttatacagatttccctatatcggatattgcgtttgaacttcatttctcaactgtctcttattttatccgtagcttccggcaatatactggaacaacgccattactttatcgaagaacgcataaaccgtaaaaagtgatatttctccctttctttctgttgcactgattgtcttctatatccctactttcgcatcagataataaccaattaaaattattgaacgatgagagatgcggaaaaaacagtagggaacatgattgataagctgaaaacggcctttatcggttccatagacagtgaaggatttcctaatatgaaagctatgttacaaccccgaaagagggaagggataaagacgatttatctgactacaaatacttcgtcaatgcgtgtggcccaatatcgtgagaacaatcatgcctgtatttacttttgtgatacgcggttctttagaggggtgatgctgcgcggtactatggaagtgctgaccgatcctgccagtaaagagatgatatggcaggaaggggatacgatgtactatcccgaaggagtgacggaccccgattattgtgttttaaaatttacagcgatttccggaaggttttacagtaactttaagtcggaaagtttcgctgttgaatagaatcagtaataatggttgaacaacccgtaatttatctactgtcagatgtatgtttcttccttaattttgtactgtaataaaatcaattcaactattgatcttgttattgataagtatggaggtattgagtttaataattaaaatagtacatttatggaaacagtaagattgaacaacggtgttgaaatgccgattttaggctatggtgtatatcaggtaactcctgaagagtgtgagcgctgtgtgctggatgctattagtgtcggttatcgttctattgatactgcacaggcatattataatgaagaaggagtgggtaatgcagtcaggaaatgcggtgtaccacgtgaagaactgtttatcacaacgaaagtatggatttcgaacggtggatacgaaaaagcaaaagcttctattgacgaatccttgcgtaagctccaaagtgattatgttgatttgttgcttattcatcagcctttcaatgattactatggtacataccgtgccatggaagaggcttacaaggccggaaaagctcgtgccattggtgtcagcaatttctatccggaccgtttcattgatctggcagaattttgtgagattaaaccggcggtgaatcaagttgaaacacacgtcttcaaccagcaagtgaaaccgcaggagattatgaagaaatacgatacgaaggtcatgtcatgggggccatttgcagaaggacgcaataatttcttctctaatgaagtattgaaagcaatcggagaacagtatggaaaatcggttgcacaggtagctctgcgctttcttattcagcgtgatatcatcgttatcccgaaatcgactcgcaaggaacgcatgatagaaaacttcgatgtatttgacttcaccttgtccgtaaaggatatggaagagattgccggactcgataaaaaagaaagtctgttcttctcccattatgaccctgaaatggttaactttctgattaatttataatagagggaatatgtaggcggaagatgtttagaaaagaatcgtcaggaaagattaatctcttctgacgattcggaatattggaacgtagcgaaaaatggaactttattatcccgatgttctccgtatgttttgtctatttgggtatgaggctatttttatatctaatgttagttatccggtaattgttaaacttaaccttgcttttattactccggacagaatccgtttttataaaacagataacttttttctattgcttcggctgtatcagcttctaatgcatatagtatttccctgcaaaattccagttgtccggttccgttagcggttatgatctttccatctcttacagcttgctgatcaacgtagttcgaatcacctgtatatctctctccgacatgttgtttcagataatcgattgtattactcgtatgctttacgttattgagaaatccatgcatagcaaggaaaacggaagcattgcatattccgccaaccactttcttatctttgatagctttttctaccagcgggactattaattcagcttctggtgaaaaccagctcatgccgccaattaatatcagacctgcataatcttccggcatatctttcaaatcataatcaggcaatactctgaatccccctattgaagagacaggctctttggttatagacaaggttttcactttataaggaacaggacttccgggcataacaccctgatttagacaggcagctataaatgcgccttcccagtcggcgaactcatttaataatacaaaaattacttctttcatatatcattctattttctttatgtatgcaaaggtgctatttaaaattgaataacccagatgatgcagtgaattattatcttttttatatatgactttataggtctgatgtccgatggcgggtaacagaatgtttaagatatccgtcagtcttagtcgtagactgtagctgttagcgatcttggtttcgtgtaatgcataaaaaaaaagtctttgattatcaatgtaatcaaagacttttttactttcttaagaagcggtgcgtacgggactcgaacccgtgaccccatgcgtgacaggcatgtattctaaccaactgaactaacgcaccaaatattaaagactaattcattttatttctctttgcttcttacttaaaagaagcggtccggacgggactcgaacccgcgaccccatgcgtgacaggcatgtattctaaccaactgaactaccgaaccagaatttcattttgttaatctgcatctctctcgattgcgggtgcaaaggtagttgttttttgtaaatctgcaaatgttttgatgaaacttttttccaataaaaagcaagaaaaaagcttagtgtctcattttgagtacttttataatgaaaaaaaatattagttttttcttcagtcaggatggtgacactatccggtcgtcatagtgacactatcacgatgggatagtgtcattatccggaggcgatagtgtcactatcctgaagtttgtcatcttcttctttggaaatagtcttggatatctttctatctgtaagaaatcaccgtttttatatcaactttctgcttgaataattcgtagttttgcaataaatcgttatttttgcgcactaaaattagataggtggaagaatttccgcccggaatagtaaattagtaaaaagaatgatgactacagccaaactgttattgcactgtcccgacaaaccgggaatcctcgcggaagtgacagactttattacggtaaacaaaggaaatattatctatctggatcagtatgtagaccatgtggagaacatcttcttcatgcgtatagaatgggaattgaaagattttctggttccgcaggaaaagattgaagattatttcagaacgctatatgggcagaagtatgaaatggatttccgtctttatttctcggatgtgaaaccgcgtatggctatattcgtttctaaaatgtctcattgcctgttcgatatgttggctcgctacacggcaggagagtggaacgtggagatacctcttattataagcaaccatccggacttgcagcacgtggcagagcgtttcggtattcctttctatttgttccccatcaccaaggagaccaaagaagaacaggaacgcaaagaaatggaattgcttgccaaacataaaattacattcatcgtgttggcacgttatatgcaagtgatttccgaacagatgatcaatgcgtatccgaataagattatcaatatccatcattccttcctaccggcatttgtgggggcaaaaccttatcatgccgcattccagcgtggagtgaaaattatcggtgcgaccagccattatgtaacgactgagctggatgcaggtccgatcatcgagcaggatgtagtacgcattacacataaggactctatagaagatcttgtaaataaaggaaaggacctggaaaaaattgttctttcgcgtgcggtacaaaagcatatcgaacgtaagattttggcttataaaaataaaacagtaatatttagctgatgaaagtagcagttgtaaaatacaatgccgggaatatccgttctgtggactatgctctgaagcggttgggagtagaagcagtgattactgccgataaagaaatacttcaatctgccgataaagtgattttccccggagtaggagaggcgggaactaccatgaatcacctgaaagcaacagggctcgacgagctgatcaagaatctgcgtcagcctgtgttcggaatttgcctcggtatgcagctgatgtgtcggcattccgaagaaggtgaggtggactgcctgaatatctttgatgtagacgtgaaacgttttgttccgcagaagcatgaagataaagtgccgcatatgggctggaatacgattggtaagacaaacagcaaactgttcgaaggattcaccgaagaagagtttgtctactttgtacacagtttctatgtgccggtttgtgacttcactgctgctgaaaccgattatatccatccgtttagcgcggcattgcataaagataacttttatgccacccagttccatccggagaaaagcgggaagacaggtgaaaggattctgaggaactttctggatctctaataaacgttgcaacagtttataataaactccgctatagtttataataaactcggtcatcgtttataataaactatttccggcttttcggagaagaagaaaaggacaggtataagaagatggagtgaacagctaaaatagtaaatcgtaaatgatcaaattgtatataaacagatgatagaaattattccagccattgatattattgacgggaaatgtgtacgcctttctcagggagattacgatagtaagaaggtctataacgaaaatccggtggaagtagccaaggagtttgaagcgaacggggttcgcaggcttcatgtggtagatctggacggagccgcttctcaccacgtagtcaaccatcgggtattggagcagattgctacgcgtacctctttaatagtggatttcggcggtggagtaaagagtgacgaagatttgaaaatagcttttgaaagcggtgctcagatggtgacaggcggaagcgttgccgtgaaagatccggagctgttctgccattggctggaagtatatggcagtgagaaaataatcctcggagcagacgtcaaggaacataagattgccgtaaacggctggaaagacgaaagcgcctgcgagcttttcccatttctcgaagactatataaataaaggtattcagaaagtcatttgtactgatattagttgtgatggaatgctgaaaggtccttctatcgatttgtataaagaaatgctggagaagtttccgaatctctacctgatggctagtggcggagtgagcaatgtggatgacataatcgccttgaatgaagccggagttcccggagtcatcttcggtaaagcattgtacgaagggcatataacgttgaaagatttgcgtatatttttataatcaggagtgctaaaatgaaaggaagcaccctgttataatgaaaaataaggaagcaggttctcggattagtagaatctaaattgtcaaatagtaaataagatagaattgtgttagcaaaaagaatcataccctgtctggatataaaagacggacagaccgtaaaaggaacgaactttgtcaatttgcgccaggccggtgatccggtagagctggggcgggcttacagcgaacaaggagcagatgaacttgtgtttctggatattactgcaagtcatgaaggacgtaagactttcacggaattggtaaagcggattgctgccaatatcaatatcccgtttaccgtgggcggtggcatcaatgaattgagcgatgtagatcgcctgctgaatgccggagcggataagatctcgatcaattcttccgccattcgcaaccctcagctgattgatgacattgccaagaacttcggttctcaggtttgtgttctggcagtagatgccaagcaaacagaaaacggctggaagtgttatctgaacggcgggcgtatcgaaaccgataaagaattgctggcatggaccaaagaggctcaggagcgtggagcaggcgaaatcctgtttacgagcatgaaccatgatggggtgaagaccggttatgcgaacgaggcgcttgcttccttggccgatcaactctctattcccgtgatcgcttcgggtggggcagggctgaaagaacacttccgtgatgcttttttagtaggaaaagcagatgcggcgttggctgccagcgtttttcatttcggagaaattaaaattcccgaattaaaatcgtatctttgcggcgaaggaataaccatcagagggtgaggcggcatgggctcacacaaacggtatagtaaattgaaatagtaattagaacttaatataagatggaattggatttcgataagatgaacggacttgttccggctatcatacaggacaacgagacacgcaaagtcttgatgctgggctttatgaataaggaagcctatgataaaacggtggaaaccggaaaagtaactttcttcagccgtaccaaaaatcgtctttggacgaaaggagaagaaagcggcaacttccttcatgtggtatctatcaaagcggattgtgacaacgataccctgttgatccaggcagatccggcaggtcctgtttgtcatacaggcacagatacttgctggggtgagaaaaacgaagaaccggttatgttcctgaaagcattgcaggatttcattgacaaacgtcacgaagaaatgccccaaggttcttacaccaccagcctgttcgaatccggaatcaacaagatcgctcagaaagtaggtgaggaagctgtcgaaacagtgatcgaagctacgaatggaacaaacgaacgtctgatctatgaaggagccgacctgatttatcacatgattgtattattaacttcaaaaggctatcggatcgaagaccttgcacgcgaattgcaggaaagacatagcagtacatggaagaagcattaattcaatataaaaacgtagaaatccatcaacaggaactctgtgtactgagcgatgtcaatctggaattgcacaaaggagagttcgtctatctgatcgggaaggtaggttcggggaaaacgagcctgctcaaaaccttttacggcgaactggacgtaatcgacggcgaagcggaagtgctgggctataatatgcgttcaatcaaacgcaagcatatccctcagttgagaagaaagctgggaattgtgtttcaggactttcagctgctgacggaccgtaccgtttacaacaatctggaatttgtgcttcgtgccactggctggaagaacaaacgggaaattcaggaaagaatagaggaagtgctcgacctcgtgggaatgtccaacaagggctataaactccccaacgaactttccggcggcgaacagcaacgcatcgtgatcgcacgtgccgtgctcaattctccggctattatcctggcagacgagccgaccggaaatctggatgtggaaacaggcaagtccatcgttgaattgttgcacaacatctgcgaatccggttcgtcggtagtgatgacaacgcacaatctgcaattgctgaaagaatatcccggcagtgtataccgctgttccgaacatcgtataacggatgtgacagacgaatacatgcccagacagagaacaatagaaatagatttaaatatagataactaaaacagtaacgaaaatgaaagttttaaagtttggaggaacttccgtgggttctgctcagcggatgaaggaagtagccaaattgattaccgatggtgaacagaagattgttgtcctttctgcaatgtcaggaacaacaaatacattggtggaaatttcggactatctgtataagaagaatccggagggtgccaacgagattatcaataagctggaatcaaaatataaacagcacgttgatgagctttttgcaactcaggaatataaacagaaaggtttggaagtcatcaagtctcacttcgactacatccgctcctatactaaagaccttttcactttgttcgaagagaaaatggttttggcacagggagagcttatttctacggctatggtcaacttctacctgcaggaatgcggtgtgaagtccgtattgcttccggctttggaattcatgcgtactgacaagaacgcggaaccggaccctgtatatattaaggagaaactgcagacacaactggaactgtatccagatatggagatttacatcacacaaggtttcatctgccgcaatgcttacggtgagatagacaacctgcagcgtggtggcagcgattacaccgcatccttgatcggtgctgccgtaaaggcttccgaaatccagatatggacggacatcgacggtatgcacaataacgacccgcgcattgtggacaagacagcgccggttcgtcagctgcatttcgaagaagcagccgagctggcttacttcggtgcaaaaatcctgcacccgacttgcatccagcctgctaaatatgccaatatacctgtacgtctgctgaatacaatggacccggatgctcccggaacactaatttctaatgacacggagaaaggtaagattaaagccgtagctgccaaaaacaatattacagctatcaagatcaaatcaagccgtatgttgcttgctcatggtttcctgcgtaaagtattcgagatctttgaaagctatcagacttctattgacatgatctgtacttcagaggtcggtgtatctgttacaatagacaacaccaagcatctgaacgagattctggacgacctgaaaaaatacggtactgtcactgttgacaaggatatgtgtattatctgtgtagtaggtgacctggaatgggagaatgtcggtttcgaagctaaagcgcttgatgcgatgcgggacatacctgtgcgaatgatttccttcggaggaagtaactacaacatttccttccttatccgggattgcgataagaagacggcgttgcagtcgctgagcgatatgcttttcaacaacaaataattccacaaataatacgagcgcttttattgatactgataaaagcgctctttttaactaactaaacaagtttcttgaattatgaaaggaatatttccaatcgataaattccgtactttgcagacacctttctattattatgatacgaaagtgctgcgtgatacattgtcggctattaaccaagaggttgccaaatatcctagctattccgtacattatgccgtgaaggcgaatgccaatccgaaagtacttaccattatccgtgaaagcggaatgggagcagactgcgtgagtggcggagaaatccgtgccgctgtccgtgccggattccctgccaataaaatcgtttttgccggagtcgggaaagcggattgggagatcaacctcggactggaatatggcatcttctgtttcaatgtagagtctatccccgaactggaagtcatcaacgaactggctgccgctcaaaataagatcgctaatgtcgctttccgtatcaatccggatgtcggggcgcatacgcacgccaatatcaccactggtctggctgaaaacaaattcggtatcagtatgcaggacatggacagggtgatcgatgtggctttggaaatgaagaatgtaaaattcatcggtctgcacttccatatcggttcacagatattggatatgggcgatttcatcgctctttgtaaccgggtgaatgaattgcaggacaagctcgaagcccgccgtattctggtagagcatatcaatgtcggtggtggtctgggcattgactacggtcatccgaaccgccagtccgttccggacttcaaaagctactttgctacctatgccggacagctgaaactgcgtccttatcagacattgcacttcgaactgggacgtgcggtggtaggacagtgcggctctctgatatcgaaagtgctgtatgtaaagcagggaacgaagaagaaatttgccatcctcgatgcaggtatgacagacctgattcgtccggctttgtatcaggcttaccacaagatggaaaacatcacttcagaagaacctgtagaggcttatgacgtagtaggtccgatctgtgaatcatcagacgttttcggtaaagcgattgacctgaacaaagtgaagcggggagacctgattgcacttcgttccgcaggtgcctatggtgagattatggcatccggatacaactgtcgtgaactgccgaaaggatacacttcggacgagctggtgtaaataaaatgtgaatgtagtttaaaaatgcagggagcttggaacaattttaactgaaatcttgttatttttgtaatgagttcaaaagaaaactacattaacaacttaataaaaatatacgattatgatttcagaaaaattacagaaagcaatcaatgagcagatcactgctgaaatgtggtcttctaacctgtatctggcaatgtctttctactttgagaaagaaggtttcagtggctttgcacattggatgaagaaacaatctcaggaagaaatgggacatgcttatgcaatggccgattacatcatcaaacgtggcggaactgctatagttgacaagattgatgtggttcccaatggctggggtactccgctggaagtgtttgaacacgtttacaaacacgaatgccatgtatctgcattggtagacaagctggtagatgtggctgctgctgaaaaagataaagctactcaggatttcttgtggggatttgtccgcgaacaggtagaagaagaagctactgcacagggaattgtggataaaatcaagaaagctggtgataccggtattttctttgttgattcacaactgggacaacgctgataatgatctgaaaaatagaaaattatataagagaagctgtttgggtttatattcagacagcttctttttttatcttacttatcaacttccctgccgggctatttctttatctttcctttttccatagctcccagataaatctccagcgagcgggtagaaatctgtatttcgcggaaggatacacccaaagaagcgattaacagtatcaatgccagtccgaatacataaaccgataacaactgcagtccgatgtaaataagaaacatactgactacacagaaaaagaggcttgctatccccagtccctgcatcgtgcgtgtcagattcaaccgtttcctcaaattctcgatttgtgctaccgtgatatccgtaggattttccatatagcggtcccgcaactgtcgcaccagctgcgcatacgataaaaaacgattggtataagccagcaaaatcagcgaaacagccgaaaaaagcaaagcaggagtagtgagcgtaagttcttccatcttgaaaaataggtaataggtaataaataataggtaataagtaataggtaataagtaataagtcatgcgggtaaagctaccggcagctacgattattacctattacctattacttattacttatttcaaggttcctagttctttgccaaccttaataaaagcagcgatacatttgtcgaggtgtgctttctcgtgtccggcagagatttgtacacggatacgtgcctgttctttcggaacgaccggataatagaatcccgtcacataaatgccttcttcctgcatgcgtgcggcataaatctgagagagtttggcatcatacaacataacggcgcagatggcactttgtgtcggtttgatgtcaaatccggcagctgtcatttggtcacggaaatagtttacattctctaccagcttgtcatgcagcgcattgctttctttcagcatcttgaatacttcgagacttgcaccgatgatacccggagccaatgagttggagaacagataaggacggctgcgctgacgcagtaagtcgatgatctccttgcggccggtggtaaatcctcccaatgcgcctccgaaagccttgcccagtgttcccgtatagatgtctacgcgtccgtaagtcttgtacagttcgctgacgccgtggcccgtagcgccaaccacacctgcagagtgcgattcgtccaccattacgagtgcatcatatttctcggccaagtcacagatctgatccataggtgctacattgccgtccatagagaatacgccgtcggtaacaacgatacggaaacgttgtgcctgagcttcttgcaagcatctttccagatccttcatatccgcgttggcatagcgatagcgtttcgctttgcaaagacgtacgccgtcgatgatagaagcatggttcagagagtccgagatgatggcgtcttcttcgctgaaaagcggttcgaacacacctccgttggcatcgaaacaggctgcatacagaatggtgtcttctgtctggaaataatccgagatagcagcttccagttccttatgtatatcttgcgttccgcagatgaagcggacagatgacataccaaatccacggcgctccatcatttcttgagaagctttaatcagacgggggtgattggacagtcccagatagttgttggcgcagaaattcagcacttcttttccttttacagtgatggcagcttgctgcgcactttcgatcagtcgttcttctttgtaaagtccggcttccttaatttcagccagtgtctggctgaggtgttctttcattttaccgtacataatgtttgagtgattaagttaatggtgcaaaggacacgatttttcttggaataaacaatatctttttgatttaaatctgaaaaaaaagtgcttactttgcgcactatttagcttaacacttttatttaaaaggaaaaatgaaacacattttgattattggagccaccggacaaataggatccgagttgacgatggagttacgcaggcgttatggaaacacaaacgtagtagcaggttacatccagggtgcagagcccaaaggagagttaaaagagtcgggaccgtcggcagttgtcgatgtaacgaatggtgaaatgattgaatcggtggtgaaggaataccacattgataccatatataatttggctgcactgctatcggtggtggctgagtccaagccgaagctagcctggaaaattggtattgacggactgtggaatgttttggaagtggcgcgtgagcagggatgtgcggtatttacccccagttctatcggatcgttcggtgcaagcacgcctcatacacagacaccacaggatactatccagcgtccccgtactatgtatggagtcaccaaggtaacgacagagttgctgagtgactactattttaacaaatacggtgttgacacacgtgctgtccgtttcccgggcatcatttcgaacgtgacccctccgggaggaggaaccaccgattatgctgtcgatatttattattcggcagtaagaggagaaaaatttgtgtgccctatcaaagaaggcactttaatggatatgatgtatatgccggacgcgctgaacgcagcaatcatgctgatggaagcagatccgaccaagctgatacaccgcaacgctttcaatatcgcctctatgagtttcgaccctgagacgattttccatgccatcaagaagcatgtgcccgcgttcgagatgatctatgatgtagatcctttgaagcagcgcatagccgacagctggcccgatagtctggatgacacttgcgcccgcgaggagtgggggtggaagccggcttacgatctggaaagcatgacggtggatatgcttgaaaagctaagagagaaactgaaaaaatgaaaaaactaattgcgggggttctggtgcttactatccttggttcctgtggaaacaagaaaacgaacatcgacccctttgcatctatcactcaagaggtggattctatccggcacaaagccgattcgatccatcaggaggaattgccggaagagcccaaaccgacagaagcggacgaatctttcgacgattttatctataattttgcttccgatgatgccttgcagcgtcagcgtgtcaagtttccgttgccctattacaagggagatgagaaaaccaatatcgaagaacgcaactggaagcatgatgacttatttaccaaacagcattattatacgctcctgtttgataaagaagaagacatggatttggtgggggacacctcactgacctccgttcaggtggaatggatattcgtgaaaacccgaatggtgaaaaagtattattttgagcgtatcaaaggggcatggatactggaggctatcaatctgcgccctgttgagcggaatgaaaatgaagactttgtggagtttttcagtcattttgctgccgacagcctttttcaaagccgacgtgtgcaggagcctctggcttttgtcacctcagatccggacgatgacttctctattctggagacctctcttgatttgaaccagtggtttgctttcaagccggcattgcctacagaccgcctttcgaatatcaattacggacagcggaatgatgataactcaccgacaaagattctcgccttgaagggaatcggaaacggcttctctaatattctatattttaggcggaaagcaggcgaatggcaactgtataagtttgaagataccagtatttagcaacgaaaaaacggaagatatgtattctcttttatcacacaatacgttcggcattgatgtctatgccgaacggtttcaggaatatgcttcggtagaagaactgaagacattgatatctcaaggtgcccttacgacaccttttttgcatataggcggtggaagcaacctgctttttgtcaaagactataaagggctggtcttacattcccgcatcgaagggatcgaggtgacggaagaggatgaacggagtgtagctgtgcgggtaggagcaggcgtggtctgggataattttgtaggatattgtgtagagcatggctggtatggaacggaaaatctctcccttattcccggtgaagtgggagcgagtgccgtgcagaatatcggtgcctatggtgtggaagtgaaagacctgatcacctctgtcgaaacagtgaacattcacggtgaggagcgtgtttatgctgtagatgaatgtggctatgcctaccgcgacagcattttcaaacgtccggagaataaatccgtatttgtgacttatgtctgcttccggctcagcaaggaagaacggtatacattagattacggcaccatccgtcaggagctcgaaaaatatcccgaactgaccttgccgatcctccggaaagtgattatcgatatccgtgaaagcaaattgcccgacccgaaagtgatgggaaatgccggcagtttctttatgaatcccatcgttccgcgcgaaaaactggaagccttgcagcaggaatttccccgaatccccttctacgaactgaatgacggacgagtgaagattccggcaggatggatgattgatcagtgcggctggaaaggaaaagcattaggtccggcggcagtgcatgacaaacaggccttggtgctcgtcaatcggggcggagcgaaaggcagcgacgtccttgcgctttcggatgcagtgcgggcttctgttcgtgcgaaattcggcatagacattcatccggaagtaaatttggttggaaaatgaaagtaagaatacttggaagcggaacatcgacgggagttcctcagattggatgtacctgtccggtctgcacttctgccgatccgaaagataatcgtctgcgtgcgtctgcgatcgttgagacggaagatgcgcggatacttatagactgcgggcccgattttcgggcgcaggtgttacaccttccttttgagaagatagacggtgtgctcattacgcacgaacattatgaccacgtgggcgggctggatgatttgcgtccgttttgccgcttcggggcggttcctatctatgccgaagaatatgtggcacgcgcattgcgtttgcggatgccttattgttttgtcgatcaccgttatcccggtgttcctgatattcccttgcaggaaattgaggtcgggcacgccttttccatccaccatacggaagtggtgcccttgcgggtgatgcacggtcggctgccgattctgggttaccgtatcggcaggctggggtatatcacggatatgctcaccatgcccgaagaatcgtatgaacaattggaagggatagatgttctgattatgaatgcgcttcgtatcgctcctcatcctactcaccagaatctggaggaggcattgaaggtggcagaacgtattcgggcaaaggagacatacttcatccacatgagtcatgatatggggctgcacaagaaggtagagaaggagcttcctgaaaatattcaccttacatatgacggaatggaaatcattttctgattattggtgatttttttagcaaaagttttgttttctttgtagaaattattatttttgcccctagccgataaacagcaaatattatgaaacttcgtacgatagtgaaaatagcgatcacttcttctgttgtacttttgtgctcaggttttgcgttgtactctttttttaggttgtcggctgccgaagatcagaaagattttgatctctataccttggttccgtcctctgtttcagcagtgtttgcgacggaagatgtagccgaatttgtaatggaagtggatgagctgacctgtagtcgggatcaccagtatctttatgtttccaaactcttttcttatctgaaacaatatctttattctcttctcgaagatgctcctcacggtctgagcaggcaaatgaatcagatgctgatcagtttccatgagccggacaatgatcgtaatcaggtgctttactgccggttggggaatggagaccgtgcgctgatcgaccgttttgtgcagaaatatgtttcgtcgggctatccttcgaaaacattcgattataagggtgaagatatcattatctatccgatggcggacggtgattttctcgcctgctatctgacggaagactttctggtgctcagttgtcagaaaaagctgatagaggaggtgatagatatccgcaaaaccggcaagtcgctggctgccgaccctgcttttaaagaagtgcgggcaccgaagaaaagtccgactgttgctaccgtctacactcgtctggcaggaatgatgggatggacggagtttgatatgaagctaaaggatgattttatttatttctccggagtcagccattatgtagatacttgttttaactttataaatgtaatccgccagcaggaatctgtcaaaggatttccgggcgaaacactgccctccactgcattttatttcagtaaacagggcattacggactgggcatccctgctttcctatggcgatacgcaggaatatgcgacggcaggcagaacgagtgaagtgttgaatcgggatcgggaattgtcgcgttatctggcagagaatacggggcaggatttggtggcttgtctttttcagcgggaagactctctgatggggcctgcggctgttttaagtctctcggtgatggatgtgactgaggcggaaaggatgttgcgctctttggtaaagacggctccggcagaggaaggaacaggccggaattcacgtataactttttgttatactccctctaaagcatatcctgtgtacaggttgcctcaaacaacgttgtttacgcaactaaccagttttgtagagccgtccttgcatgttttcgctacattttatggtgggcgtttgctgcttgctcccgatgaagatagtttgtcacgatatatccgccagctggataatggcgaagtgcttgacggcgctttggcttatcgggcggggacggacggattgtccgattcgtatcatttcatgttgatggcggactttggacacgtactcgaacagtccggacatcaggttcattatgtgccggaattctttctccgcaactccgaatttttccgtaatttcattctttttgcgcagtttacttgtgcggacgggatggtctatcccaacattgttttgaagtataaatccgaatagaattcgaagaaaaaaaactggcgaaaagtagaggggaaaaatagctcttaatttgcaaaactaaaagctctgaaacgccttctggcagggcgcgaaaaccgaatggaaaccagtagagtagagaagagtatataattctattctaaagaaatagaattaataagaaaaaagacagagaattttgccgccgctgattcactttttattccattccgtaagatgcctttaagagaattcatgaaggggtgtcaaaagagctaaagtgggggctaaaaaatcgattctatctctattctcctccttcgggaaggaggaatggtcgcagaccgaggtggtaggagaaataatgtttatttctatttctttgtaaatgataggattatgtattcacctaccacctccccctacgggtactcctccttcctgaaggaggagagtttagttactattgacttttggcataccttcatgggggcttttccgtctcgctgtccaatctccttcgtctcgctgctcaattcctttcgccttgctgctcaattcctttcgcctcgctgctcagtccttttcagctcgctgctgaatctgcgttggccccgaggtgaattcacttcagcccggtgtctggttactacaggggacagtcataaaaaaactcccgacagaaatagttccatcgggagttttttatgcagattgtttttaattcttagaacggcaggtcgtcttttgcgtcacccatagtgaaatccggggtagcagacggagccgggggaggaacgggggcacccggagccataggagcacctgcgcctacacgttcaactttccatgcacggatactgttgaaccaacggtcgttccattgacgggcgtcaacgtcgaatgatacggtcagttcttcgcccatctgaatgttgaactgttcgattttgtcggcgccaaatacgtcgaaacacattttgcgcggatattggtcatggttttcgattacgaactcttgtgatttccactcgttgccgctagtctttgagactccacctctcggagggaggatagcgatgatttttcctgtaaattccattgcgataattttaaattctgcggcgaagttacaattttttaggaatatccctcacacaatgcttgttttttctttcgttttcttgggcagcacgaatcttttttcgtaactttgtgcgatatataattcaaaacttaaatactcgaaaatatatgaaatttatcgtttcaagtactgctctttccagccatttacaggctatcagtcgtgtaattaactcaaagaatgcgctgcctattctcgattgttttctcttcgaattggaagacggaacattgtctgtgactgtttctgacagtgaaacgaccatggtgacaaccgttgaggtaaatgaaagcgatacaaacgggcgttttgccgtagtagcgaaaacattgcttgatgcactgaaagaaattccggaacaaccgttgacattttacgtcaacacggacaattatgaaatcaccgtgcagtatcagaacggaaaatatagtctgatgggacagaatgctgacgaatttccgcagtcggctgtgctgggcgaaaatgcagtccgcgtggagatggaagcaggtgtactgctgggtggcatcaaccgttcggtattcgcaactgccgacgacgaactccgtccggtaatgaacggtatatatttcgatattacaacagaagacatcacgatggtggcatcggacggtcataagctggtacgttgcaaaacgctggctgccaaaggaaacgaacgtgccgcgttcatccttccgaagaagcccgctacattgctgaaaaacctgcttccgaaagaacagggaacagtaaccatcgaatttgacgaacgcaacgctgtgtttatgctggaaagctaccgcatggtctgccgtctgatcgaaggacgctatccgaactacaactcggtaattccgcagaacaaccctcataaagtgactgtagaccgtcagcaactgatcggagctttgcgccgcgtgtctatcttttcttcacaggcaagcagtttgatcaagctgcgtatgcaggagaatcagattgtgatttccgcacaggacatcgatttctccacttctgccgaagaaacacaagtttgccaatattcgggtgccgctatgagcatcggattcaagtctactttcctcatcgatatcctgaacaatatttcggccgatgaagtggtaatcgaacttgccgatccgtcgcgtgccggagtcattgtgccggtagaacaggaagaaaatgaagacttgctgatgctgctgatgccgatgatgctgaacgattaattaattatttaatggataattgagaatggataatggataatgagctgcgctgtcagtggtcaggagttatccattttttatgtttcctatccattatcaattctccattatccattatccattaaagaaagaaatgaaattaaatttgaaaaacccgattgtgttcttcgatctggagacaacgggaaccaatatcaacacagaccggatcgttgaaatttgctatctgaaagtatatcctaacgggaatgaggaaacgaaaaccatgcgtatcaatcccgaaatgcatattcctgaagcttcttctgccgtacatggcatttatgatgccgatgtagcggactgtccgactttcaaggaggtggcaaagaatgtggcccgtgacattgaaggctgcgatttggctggattcaactctaatcgcttcgatattccggtattggcagaggaatttcttcgtgccggtgtagatatcgatatgacgaagcgcaagtttgtcgatgtacaggtgattttccacaagatggagcaacgtaccctttcggctgcctataagttctattgcgaaaagagtctggaagacgcccatacggccgaggccgatacacgtgccacttatgaggtgctgaaagcacagctcgaccgctatccggatcttcagaacgacatcgccttcctggcagaatattcaagtttcactaagaatgtggactttgccggccggatggtgtatgacgacaatggtgtggaagtatttaatttcggaaaatataaaggaatgtctgtagccgaggtgctgaagaaagaccccggatactacagctggattttaaacagtgatttcacgttgaataccaaggcggtgctgactaaaatccgtctgcgtgaaatgagtaatttgattacaaaataatgctaaaaggaaaaaagataattcttggaataaccggtagcatcgctgcttataaggcttgttacattatccgcggactgataaagcagggagcggaagtgcaggtggtcattactccggcgggaaaagaatttattactcccatcactctttcggctttgaccagtaagccggtcatcagcgagttctttgcccaacgggacggtacgtggaacagccatgtagacttgggtctgtgggcggatgccatgctgatcgcacccgctactgcctctaccattggaaagatggcgaacgggatagcagacaatatgctgataaccacttatctttcggccaaagctccggtattcattgcaccggctatggatctcgatatgtatgcacatccttctacgcagaagaatctggatatattgcgttcttatggcaaccgcatcattgagcccgcaacgggtgaacttgccagccatctggtcggcaaaggacgtatggaagaaccggaaaacattatccgagtgctggacgagtttttctctgcgagtgccgaacttcagggaaggaaaattatgataactgccggaccgacttacgaaaagatcgatccggtccgttttatcggcaattattcttccggtaagatgggatttgctttggcggaagaatgtgcccgtcgtggggcagaggtgacgttgatcgccggaccggtgcaactgaaaacgcagcattcgcgtatccaccggatagatgtggaatctgctcaggaaatgtatgaggcagcgcaaacctgtttcccgacttccgacgtggggattctttgtgcggcagtcgccgatttccgcccggaaacggtggccggcaaaaagatcaaacgggagaaggaagaaaaactgaccttgcatcttcaggctacgcaggacattgctgcaagtctgggaaagatcaaagaagacaatcaactgttagtggggtttgccctcgaaacaaataacgaacagcagaatgccgaaggaaagctcgaacgtaaaaactttgactttatcgtcctcaactctctgaatgacgcgggagccggcttccgtcacgatacaaacaagattagcattattgatcgcaaaggtcgcgaggattatcctctgaagcccaaacaggaagtagcgcaagacatcatcaaccatctggttgccgtcttgactcactgatctttattttttaggtttaatttttaatttacagaaggtgttacgttcactttatattcagaattacgcattgatagaaaaactggatatcggttttgaaacaggcttctcggtcatcacaggcgagacgggggccggaaaatcgattattctgggagccatcggtctgctgctcggacagcgtgccgatgtgaaagcgattcgtcgtggagcttctaaatgtattatcgaagcacgttttgatatctcggcttacggtatgcgcccgttttttgaagagaacgaactggaatacgacgacgaggaatgtatcctgcggcgcgaagtgcaggcgtccggcaaaagccgcgcattcattaatgatacgcctgcttcgctggcacaggtgaaggaattgggcgaacaactgatcgatgtacattcgcagcatcagaatcttttgctcaataaagaaggtttccaactgaatgtactcgatattctggctcataacgatgatgcgctggagaagtatcatttactgtataatgaatggaagctgctcgaccgtgaattgtccgagctgacggcacttgccgagcaaagccggacggatgaggactatcttcgtttccagctggaacaactggaggaagctcatctggtggaaggggagcagagtgaactggagcaggaggcggaaactctgagtcatgccgaggagatcaaagcggggctttaccgcatcgaacagtcttttttctcggacgaaggcggactgctttctttcctgaaagataatctgaatacgctgaataatctgaaaaaggtgtatcagcctgccggagaactgagcgaccgcatggaaagtgcctacatcgaactgaaagatatttcgcaggaagtctcagcgcagggagaatccatcgagtttaatcctacccgtctggacgaagtgaacgatcgtctgaatctgatttactccctgcaacagaagcatcgggtacagacacttgaagaattgatggccttggcagaccaatatcgcagtaagttgtccgagatcacctcttatgatgatcgcatagccgaactgactgcccgcaaggaagcccagtatgaacgggtgaagaagcaagctgccgtgctgacaaaagcccgtgcggcagccgcccgtgaagtggagaaacaactggctgaacggctggtcccgctgggtatgcccaacgtccgcttccaagtggaaatggggttgaagaaagaaccgggcatacagggggaggatactgtcaacttcctgttctccgccaacaagaacggaacgttgcaaagcatatcttccgttgcttccggaggtgaaatcgcgcgtgtgatgctttctatcaaagcgatgatcgccggtgcggtgaaactgcctacgattgtatttgatgagatcgataccggagtttccggtgaaatagccgaccgtatggcggatatgatgcaggaaatgggtgactgcaaccgtcaggtgatcagtatcacacatctgcctcagatcgcagctcgcgggcgcgctcattataaggtatataagaaggacagcgatacggaaacgaacagccatatccgccgtctcaccgatgaagaacgggtagaggagatcgctcacatgctgagcggagccacattgaccgaggctgccctcagcaatgcgaaggccctgttggcccgtacttcataatccataattcaaaatttataattcaaaattacaatgaccgataaaagtgaaatgattttcggcgtccgtgccgtcatagaggccattcaggctggaaaagaaattgataagatcctcgttaagaaagacattcaaagtgatctttccaaagagcttttcgcagcattgaaaggattgctgattcctgttcagcgtgtgccggtggaacgtatcaaccgcatcacacggaagaatcatcagggtgtggttgccttcatttcctctgtgacctatcagaagacggaagacctcgttcctttcttattcgagcaaggcaagaatccgttttttgtgatgttggatggcataacggatgtgcgtaactttggtgcgatagcccgtacctgcgaatgtgccgcagtggatgcggtgatcattcctgcgcgtggcagcgtatcggtgaatgccgatgccatgaagacttccgcaggtgcgttgcatacattgcctgtctgccgcgaacagaatctgcgtgcgactttgcagtatctcaaggacagcggtttccgtatcgttgccgctactgagaaaggagattatgactatacgaaagccgattatacgggaccgatgtgtatcatcatgggagcggaggacaccggtgtatcatatgatcatctggctctctgtgacgaatgggtgaagataccgatgctgggaactatcgaatctctgaatgtttccgtagctgccggtattttgatttatgaagctgtgaaacaaagaaacaacgactgatatgaagaaacttttaatcttacctttagcgcttttcctcttggtacagagcggtctggcgcaaaccccgaaatgggtggagaaggcgaaacgtgctgttttctcagtaataacttatgataagaatgacaagatgctgaataccggaaacggatttttcgtatccgaagacggactggctctctctgactacagtctcttcaaaggggctgagcgtgcggtgattgtcacagccgaaggcaagcaaatgccggtcagcctgattttgggagcagatgatatgtacgatgtgatcaagtttcgtgtggccatcaccgagaagaaagtgccatcactggtagtggcgactactgctccggctgcaggcgctgacgcatggatgcttccttattctacgcagaagagcattgcctgcgtttcgggtaaagtgaaggatgtatcgaagattgccggagaataccattactataccttgagtatgcagatgaaagacaagatggtgagttgtccggtgatgaatgcggaaggccaggtgttcggtatttcacagaagtcctccggtgcggatacggtaacgacttgttatgcggcaggggcagcttttgcaatgtcgcagaagattagtgctctgtctttgggagacgttgctctgaagaatatcggtatccggaaaggattgcccgaagcggaggatcaggcattggtgtatctgtttatggcttccacgcagatgtcggctgatgaatatgagaaattgctggacgatttcattcgccagttccccagcagtaccgatggatatatccgtcgtgccaactattacgtagcaaaaggtaaggatgatcagtcttattttgacaaggctgtagccgactttaatcaagccttgaaggtggcggctaaaaaggatgatgtgtattataatatcgccaagctgatatacggttatcagctttcaaaaccggaaacgacttataaagactggacgtatgatacggctttgaaaaatctccgtcaggcgatggctatcgatcctttgcccgtttatacgcagttggaaggagatatactttttgcacagcaggactatgcaggtgctttggccgcttatgagaaggtgaatgccagcaatctggcttcagcagcctcattctttagtgccgccaagacgaaagaattactgaaggcagatgccaaagaagtgttggcattgatggacagctgcattgctcgttgtccgcagcctgtcacggcaaattttgctccttatctgctggaacgtgcacagatatatatgaacaacgatcaggcaagaaatgcaatgctcgattatgatgcttattataaggctgtgaacggacaggtcaatgaccttttctattattatcgtgagcaggctgcgctgaaagcccgtcaatatcagcgtgcattggatgatatcgtgaaagcggttgaattgagccccaaagatctgacttatcgggcagaacatgcagtggttaatctgcgtgtaggacgttacgaagaatccatgaagatactgaatgaaattctgaaagacgagccgaaatatggggaagcataccggttgttgggcctttgtcagatacagttgaagaagacggacgaagcttgcggaaacttcaataaagcgaaggaactgggtgatccgaatgtggatgaacttataaaaaaatattgtaaataagcggaggtgcttggaaagaataacgtcttactttcttttcggactccttagtagtaaaaataaacccctgccggcttctacagtcggcaggggttctcgtttttggggacgtttgtaaaatactctctctctctaatttctccccacttgtcaagttcaggtttcaggtcttaatatgatatataggtttgattcttttttttctcccgtttataagttaaatgcagcagtttatagaatactgcatcctttctttatttttttttctcagaatagttattttttttctttttatggtaaaatcttctgattgaggtggagcttttaattcttttttaagggctgggcaatgaaaatattgaatatttcattgttcgtaaatggtataataaataggtgttgaaaatgaaacaaacagatatttccctctaattatggtcgtttaacgaaaatattattgttttttatttgcgtatattggtaaatatggtcatctttgcaccgttattcgtttctgtttgttaaagaataacgaataagtgtggggtaaatagatgatttttagtaaaaaagacattcaagaagttctgccggcagatgtgactggcaggagcgtagcgcaccctaaacgttggttagtggctttagtacgtatttctcatgagaagaaaacgagtgagcgactatctaaaatgggtattgaaaacttccttcctgttcagcaagaagtgcatcaatggagtgatcgtcgaaaggtagtcgagcgtgttcttcttccgatgatgatatttgtgcatgtcgatatgtatgaacagaaagaagttttgacattgggctctatcagccgatatatggtattgcgtggagaaagtactcctgctgtcattccggatgaacagatgcaccgctttaaatttatgctagactattcggacgaggcgattaatatgagtacgactcccttgtcaccaggaaccaagattaaggttatcaaagggccattatccggacttcagggagaattggttacagtaaatggaaaatcgaaagtagcagtccggctaactatgttgggatgtgcttttgtagatataccagtagggtgtgtagagcctctggagaaataagggtttaaatataagtgaaacaagcattaagtgaataaaaggggtatggtgagttttttactacaagaaaatattgatgaactgcaacatctggcagatcatttacttcacatcggtgataaaaatgggtatgtatacgccgatgacctttctgcattacaacaatcaatccacgaaaagataaacgatttatattcacaacggggggagacaccggagcaggatgctaccctgtgtttggccatccttcagggatataatgtgtcgatgtacgccaatccggaagacgaggatagaaaacggtctgtcttgcagcgttctctgaccctccttgatgttcttcccccttctcttcttaaacaacagttgtctgcggtctgtcacggtatgcaggaactgtgtgaaaccaactaacttttttatttgtcaatgaaaatacaacgactttttagcattctacttttttgttctatgctgggaagtggctcgcttatggcccagtccatgagtgactcacaggtactggaatatgtgaaggacggtatccggcaaggcaaggaacagaagcagcttgcttccgaacttgcgcgtaaaggtgtgaccaaggaacaggctatgcgcgtgaagcagctctatgagcagcagaacaatgtaaacacctcccaatccacgggtacggatatcaacgagtcccgccttcgtgaagagactaaggagaatacttccgacatgctggaagatcatccgactacggaagatttggcccgtgaggatcaggttttcgggcgcaacatcttcaatacccgcaacctgacgttcgagccgagtgtcaaccttgctactcctgccaactaccgcctgggtcccggtgatgaagtcatcatcgatatctggggtgctagccagaatacgatccgccagcagatctctcctgaaggcaccatcaatattcagaagatcgggcctgtcaaccttagcggtatgacagtctccgccgccaacgagtatctgaagggcgccctgaataagatttataacggtctgaacaatactaccgaccctacttccgacatccgtctgactttgggtaatatccgtactatccagatcaatgtgatgggagaagtcgtgcagccgggtacctacgccctttcttccttctctaccgtcttccatgcgctttaccgtgcaggcggtgtgagtgatatcggcagcctccgaaacgttcagttggtacgcaacggaaagaatatcgccaccatcgatgtttacgaatttatcatgaaaggcaacacacaggatgacatccgccttcaggaaggtgacgtggttatcgtccccgcctacgatgtcttggtaaagatcagcggcaaggtaaaacgccctatgcgtttcgaaatgaagaaagacgagaaccttgccactttaatcaaatatgccggcggctttgaagccgatgcctacacccgttcattgcgtgttgtccgtcagaatggtgaggaatatgaggtcaacacggtcaaggatatggactacagcatctacacaatgcgtaacggtgacgttgtaacagccgaagccatccttaaccgcttcacaaacaaactggaaatccgtggcgctgtctatcgtcccggtatctaccagctcagcggtaaactgaacacgatccgcgaacttgtccatgaagcccagggcctgaccggtgacgctttcctgaatcgtgccgtcctttatcgccagcgtgaggacctgaccagtgaagttgttcagatagacatcagatctatcatgaacggcacttccccgaaccttgccctgatgaagaatgacattctctacatcccgagcattcacgatctggaagatcgtggcaatgtcacagttcacggtgaagtcgcccaccctgattcctatccctacgctgataacatgacacttgaggatctgatcatccaggccggtggcttgaaagaagccgcctccactgtccgcattgatgtgtcgagacgaatcaagaatccccgtagtaccgcggataatgatactatcggtcagatgtataccttctctttaaaggatggttttgtcatcgacggtcagcccggttttatccttcagccttatgacgaagtttatgtccgtcgcagtcccggttatcaggcgcaacagaatgtagtcattgatggtgaaatattgtttggaggaaattatgccatgaccaaccgtgaggaacgtctttccgatctggtgaataaagcgggtggtcctactaaccttgcctatcttcgtggtgcaaagctgacccgtgtggcaagtgcgggtgagaagaaacgtatgggagatgtgattcgcctgatgagcaggcaattgggagaggccatgattgactctttgggtattggtgttgaggatacctttacggtaggcattgatctggagaaggctttgactaatcctaagggtagtgccgaccttgtcttacgtgaaggtgatgtggtcttcataccaaagaataataatactgtgactatcaatggtgctgtcatggttccgaatacggtttcttatatgaagggaaaggatgtagactactatttgaatcaggccggtggctattctgataatgcaaggaagagtaagaaattcattgtttacatgaatggtcaggtgacgaaggttaagggtagtggtaagaaacagattgaaccgggatgtgagattattgtgcctagtaaggctaagaagaaagggaacatagctaatattttaggttatgctacttccttcagttctttgggaatgatgattgcttctattgctaatctgataaagaaataagattatgtctgaacaacatgtgagtaagaaccaatctacagatttagatacttcttcgaaagatgaaattgatttagtggaaatcttgtgtaaaattatagtaattcgtaaaaaaatatataaagttgctgggataggactgattattggcgttattgtagcattgagtatccccaaacagtatacggtaaaagtgactctttctccagagatggggagttctaagggaactaatggattagctggacttgctgcttcttttttaggtagtggagctacaacaggagatggctctgatgctctaaatgcgtcactttcttctgatatagtctcttctactccttttcttttagagttattagatataactgtctcttcttcgaataaaagtaaagatataactttagcatcatatttggatgaacagacttccccttggtggagttatgtgatagggttacctggtattatcatcaatagtattaagtcattgtttgaagatgacaacaatatagatattgataataaagtaaagagaggtgctattgaactaacaaaggaagaaagtgaaaagattgctacacttaaaaggagtataactgctttggttgatcaaaaaactgcaataaccaatatctctgttactttacaagatcctaaaataactgctgttgttgcagattctgtagtgtgtaaattgcaagaatatattatcaattatcgtacttctaaagctaaggaagattgtagctatttagaaaaactttgtaaagagcgccaacaggagtattatgtagcacaaaaaaaatatgcactatatatagacactcatgatgatataattcttcaaagtgtaagagcagaacaggaacgtttacaaaatgatatgaatttggcttatcaagtatatagtcaagttgctagtcaactgcaagttgctagggcaaaagtacaagaggaaaaacctgtttttgcagtgttagagcctgctgttgtgccacagtatccttcagggatgggattaaagatatatgtattactatttatgtttttggctatcgtaggcacgattagttggatatttataggtgacgatttatggaatcgtttaaaaggaataagataaaaatagttttgtataatgctttgttatattcaccttaaccaattatgaatttaatatttattattatatcttttgttatttctgtaggtgtttcccgacttattatacctcgtattttgatgatttcattacataagaaattatttgatgtaccaaatgaacgaaaaatacataagcatgccattcctcgactaggtggtgtcgctttttttcctacaatattgctttcttgttgtatcgttttagcacttcgtgctttgatggggtataatatatcaatattgcaggctatatatgcattgcctgaatgtacacttctagtttgtgggatggttcttttatatctgactggtatagctgacgatttagtcggagttcgttatcaccagaaatttattattcagattttatgtgcaagtttgttccctattgctggtctttggataaatgatctttatggattattcggtatttatgctcttccatcctatgttggtataccttttacaatatttacggtagtatttattactaatgcaattaatttaattgacggtattgatggtcttgcttcgggattgagcagtgttgcattattggtttttggtttcctatatattagtaagggcttatggttgtatagtatgtttgcctttagtacgtttggggtcctagttccatttttctattataatgtttttggaagcgcagagcgcgatcgtaaaatattcatgggtgatacagggagtttgactttggggtatatcttgagttttttagcaatcaaatatagtcagaataatgtagatgttatttcgtatactgaaggtgcatttgtgatagcttttagtactttgatcgtacctgtatttgatgtggtccgtgttatattagttcgttttcgtaatggtaaaaatccatttgagccagataaaaatcatattcatcataagtttttggcaatgggattcactccacggaaatcgatggtaattatattattgatttcttgtacttttagtggactaaatatattgttaatgccctatgtgaataatacactcatgttgatagcagatatcttgatatggattagcttgaatttatggtgggataaaataaagatgaataagctgatttaaatattgacatatataggattaaaggaaaacttttaaaaatcatatttagtaatgaaagcatgttttatggggttaggctatattggtcttcctacttcgattattgccgcaaaaaatggtattcaaattctaggagttgatataaatccaaaagtagttgaaaaaactaatgcaggagaacttcatataattgaaccaggtatggaagaaatattgaaagaagtagttatgtctggtatgtttcgagcttcaactatacctgaagtttgtgatgcttattttatggtagtgccgacaccttttaaaggtaatcatgaaccggatatttcttatgttgaagcagctacgcgttccgtaattccgtatttaaaggaaggggatctttatgtgatagaatcaacttcaccagttggaaccacagagttaatggcgagtattatttatgcagagcgcccagaacttgaaggacaaatttatatagcatattgtcccgagcgtgtattacctggaaatgtaatatatgaattgatacataatgaccgtgttattggtggattaaatccagagtcaacagagaaggctattaatttttattctcagtttgttagaggtgtgttacataaaactaatgctcgaactgcggaaatgtgtaaacttacagaaaactcttctcgtgatgttcagattgcctttgcaaatgaattatcaatgatttgtgataaagcgaatataaatgtgtgggagttgattaatttggcaaataaacatcctcgtgttaatatattgcagccagggtgtggagtaggtggtcactgtattgcagttgatccttattttataacagccgagtttcctgctgaatctcagttgataggaaaagcaagagaaatcaataattacaaatctttctggtgtgctgagaaagtaaaaaacgcaatgcttgaatatgaattgaagaatcatcgtaagcctattgttgccatgatgggactagcatttaagcctaatattgatgatttgcgtgagtcgccagcaaagtatgtcacgacaaaagtaatgcaaaattgtaataatgccactatatttgtagttgagcctaatgtgaaagaacataacgtatttaagttgactgattatgaggaggcttatgataaagctgatattgttgtgtttatggttgcacatgatcttttcacgagtcttccttatcgaaaggataaagttattcttgatttttgtgggatatacaaataatagatagatattgcatacatccgttggtaaaaacaagcgcatagcaaaaaataccctaatgttatatatgcgtatgctgcttattatggcagttacgttatatacttcgcgcatcattctgaatactcttggtgtagaggactttggtatttataatgttgtgggtggtgtgatttctatgttaggatttttaaattcttcattagggggagccagttcacgctttattactttttcgttaggaaaaaacgataagaaggaattaaggaaagtcttctctacggttgtttttatacatcttattcttgctgttgttatcattctattgggagagacgctaggattatggtttgtttatcataaactagttatacctcctgaacgtctgacagcagccttgtgggtatatcattgttccattctgactgcagttgtgtctataataagtgtaccttataattcattagttgtagcccacgagcgaatgagtgcatttgcttatatttctgtaattgaggtagctttaaaattaggcattgtttattttttggtatatatttcacaagataaattgatcacttatgctgtgttatatctgatcgtgcaaatatttatccgatttttatatggatgttattgttctagccatttttcagagagtaagattctgtttggttggagcccacagttagttaaagaaatttcaatttatgctggttggacagtaaatggaaacctagcagttgtaggatatacgcaaggaatcaatattcttttgaatttgttttttggtccagtagccaatgctgctcgtggtattgcagtacaagtgcaggcggcggtaatgacatttatgcagaatatgcagatggcagttagaccacaaattataaagtcctatgctacttttgatttgtcatatatgcatacattggtggtggcatcatcaaaatatggtttttttttaatgttggtgctaactttcccgattatgttgtgtgtagatcctatattgaaaatttggcttggggtagttcctggatatacggtaggatttgtgcgaatcatgttaatgataggtttgttggagtccttaaaagtagcattaattagtgctatacatgctactggcgatattcgaaaatttcaaatttatgaaggaacttttttgttaacagttgtgcctattgcttatgtcttgttgaaagtatatcatatttctccaaatgatgtgatgttagtatatttttttgtggaattagttactcaatgtattcgtgtgtggattgtttgtcctcgtattcagatgccttttactagttatttaaagaaaataatttgtccgatattacctcctttgctatgcatacttccagtcttatcttggctttctctgcctaaagaactttctttgggctgcttggctttatatttgtctttagctgtattatatgttttgatttgtatttatctattaggattaacaagttcggaacgtagaataatgtataattttgttaaaacaaatattaattgtattttgaattttttacgagtgtaaaaaatcacaataagcaatatagtaacgaattgtataaatagatgagaatgacaaatattgatgtttcgattattattgtaaattatgacatcacatctttggtagtaaatgcaatagattctttatttcataaaataaaagatcttactattgaaataattgttattagtaatgtttctaatgatatctccccccccctccccaaaaagcaattgttagaaaaaaatggtaattttttattgttggattaaaaggaagggtcggtttgggtagagtaaataacgaaggtataaagaagattaagggaagaaatattctacttctcaattctgatatacttttacttctcaattcagtaaaaatattatctgattatttatatactcatcctaaagttggggcttgcggaaggaacctgtataatattaactaaaagctagtgtatttttatcatcgttttagatctggaattttctcagaagagttagcagtacttgtgatgggaataagtaatagatttatttatcagcctcttttacctatacctctcatcctattgctgtaggaaatgtttcgggagctagtatgatggtttctcgtaaagtattagatgaagttggaatatttgatcctgatttttttatgtattcagaataaactgaattatcttggagaataaaaaaatggatatataataaagagcgtgcttcaatcaagaattgctcatttggagggacaaagttttaaagtgcctgaaacaagaatacgaatgatgttggaaagttttatgaaatattatatcaaaacgaggggatgttttgatttgaaagtagctgatattttattatggctaggtgtggaaataaatgtaataggttggaaaatattaaaaagaagggaacgagaaatattttataagacgaaatggatattggtaaataaaatgtgttcattattttggaggttatgagaaatgatattgaaaagagaatattatctgtgattgttcctgtatataatgcagaacaatatttggatcaatgcatttccagtatattggatcaatctttttctgatttctatttgtttttagttaatgatggaagtacagataactctagagatatttgtgaaaaatttgcattgctagactcacgtgtaacagtatggcatcttcctaataatggaccaagtactgctcgaaattttgctttggagaaggtttctactgagtgggtgtgttttgttgattcagatgatattcttgaaaaggattatttgaaagtcttttttaagtacggtgttcctgataaatattgtttggagatgcaaggaatggaatatgtagattgtactggaaacaaaggattgaatcatattatatatccggaaatatatttattgggagaaaatgttaagaatggaattgttgagcatagattgttgcattcgggggggccatgtcttaaattatataatataaacgtaattcgggaaaattgtataacttttaatacagcgtttcgctttcatgaagatcatatattttatcttcaatatttatataatgtaaaaagcattcgcttgttgtctggtgctaaatataaatataggcaagtggagggatctttgactcatcgaatacatccttatgagcagattgagttagcttatcacttattttcaaataaactcgaactggttataggcaaattccaaattgaggattcatcttatttgaagcagatcaggcatgatgtagcaagaattcatgttaaagcaattcgtttttgttatctgtcaaaaccgattaaacttgaaagggtgaagtttctagaatcttgtaaagcggagaaagaaaatatgaaaaaaagatactttcccacttcgtgtaaggaatggatttggaaagctattctattgtacgttccagtttcttttcaggatttactattgtcaataataattaataaatatgaaggaaaagacagttaaaaaggtgttatttctacgaaaaaaaatatctggggagaatagcatagaggaacttgcttatattttgatttctaaaatccctgatttagagttagtcatatttccagagacgggtaactcttttagtaaaatagttaaaaatatatgttatgcacggaaacatcaaggagacataaatcactttttctctccttctgattgttatgtaattccatttttgaaaaataaaaaagttgtaacttggcatgatgttgggacaggattgatgtctcaatcagtaataaaaagatggatacgaaagaaattgttaatggcattccctttgtattttgctgatagattaacttgcatttcagaacatactaagcaagaactgaaagaattatattctggttcagaaaacagatctttggtaatttataattgttataatcccaaattagaatatacgcaacatacttttaatactcaaaaaccgataattttgcagataggtactggtatgcgtaaaaacttagctcatgttattgaagcattacaaggaattgagtgtgtgttatatattgtaggcaagctaagtaaggagcaaaagagacttttggaagaaaatgaaataaattatgtatcagaatatgatgttgatttcaaaagaataattgaattatataaactatgtgacattgttagttttccttctttttatgaaggatttggaatgcctataatagaagctaacgttactgggagggtagtattgactagtcgtatgggggctattcctgagatagcaggagatgccgtatattatgtagatcctcatgatataaatgatattcggaaaggttttttgcttctaattaaaaatgtaagttatcgaaattcattgattgaaaagggcaggataaacgctaaacgttttacagtagataaaatgataaatagttatagtgaattatatactcaacttgcgaaataagcaccaactaatgataatacatagttattatagtaaataccttctgttatctttcttgattagctttcttttatacatagggttaattttggttactgatacaataaatggggagtttgtatgttggcagatatttacaatattttcttttttttcttctttatatttagggctaaagttgaaagtaaaagaactgtttttgcttatctttagttatcaaatcatcttctcttatattttacattggtactttttatttaaaactagtagtgcttttggattcaatgcggtcgattctgttttatattcccagattgcgtttcaaataaaggatatgaattggatagaatctattagggtaatagaacgttatttttatgatttgtctgattatggttatccgttgtttttgaaatgtgtatatactttgggaggaagtttggaaaattcgataatattgttgatatttattaattgcgtgatgcaaacaattgtttgtattatgacgtatgatctttctaatatgctattgtatgatagatataaatctcaatggataactttgttatggggattaaatacggcatctgtctatttgaatgcatctggacttaaagaacctttatttttgttcttatctgtggctactatttggagtatatataaatgtaaggagagaaagaatattggatggcatatactagtatggatgttaataacttccacttggttttttcgttattatttatctttgttttttataattatatacattggatactattggtttccatatctctataatcgttattttggggtaatttgtatagtttcaattgttctatgcctttattttacgagtttgttggtgtactatttcccagcgatatattatgctttgttaaataccgaagaaacattttcgtctaatggcatattgtttaagtatgtttcgtatttgcttgcatttttaagtccaataccaaaatattttcaagtagcaacacctcaagatttgattatgcttgtttattccatagtgaaattctctttttcaatctttgtattattaggttcatatttttttattaagcataagaaaacgcaattttatcctttaataagtatcgttctgtttaatgttttactgttaattgtgtctggtcatatgattgaatataggtattcatatgttataatgccatgtttttttatattgatgatagctggaatggaatatagaaacaaatatcttactactgtatatttgtttttctcggcttttattattttattgtttaatctgcgtttgtattagtttgcatgaaaattttggttatttctaatatgtatccttctgttaaggatcctgtgtatgggacttttgtacaaacttttgtggaacaaatgaaggtgttaaacactgagggcaaaactaatataatcgttattaaagggcgtgatggggagtatggaaggaagctgtttaaatacgtaaaattttatattagtatacttttttctttactgtttcggaaacatgatattgtctatgtacatacaattacctatcctattatccctatccgtttagctttactatttcgaaaacttcccttagtctttaatgtgcatggaggggacgtattgactcatgggaaaatagcaggaaagatgaagcaatatgcacgtcctgtattacggaatgcaaggatgattgtttcaccttcctttttttttaaggagatattgttatgcgaatttcctgagctagagggggataagatatttgtatcttcttctggcggggtgggtgttgaattttataaagagaggccgaaagtgaaaaatgagattcctataataggatatatttcgcggatagataaaggaaaagggtgggatacattgatagatgctttatctatattgcgagaaaggggagtttcgtatactgctatcattgctggtcgtggtacattagaaaaagaaatgatgaaaaaaataagagatttatatcttgataatttgattaaatatataggtccaataccttatcattctcttcctgaaatatattgtactttagatttatttatctttccaacatgtttggaagaaagtctaggattagttggattagaagcaatggcttgtgaagttcctgtgatcggtagttatatcggtggattaaaagactatatcaaagataaagaaaatggattcttttttactccgggaaatgcggaagaactttctaataaaattgaattatatctatctttatctagttctgaaaagcaaaaaatgactgaagctgctaaaaggaaagcgcaacggtatgcttcagaaatagttggaagggagttgtatgctcaattattgaggttgattgattaagattttatttatcaaaaatattatttatataatttgtttactcatatattatgtaatggtttactatttgtctttttcaacaatactctttggaaaaatatcctgtaaaataagatccttttttaattattataatttactagatacgagaggtaactatagatttaaacattaaaaatgagaattaaaggacggaaataattcgggattagaatgtaattttaaaatgcaaaatgtagttctgggttagctaataatgttataataagaagaaaaatgttgataccttgggtctcattttgataaaattgatattcctatgaaattgcaagactcgtctagtaaaattaaaatataaagtggtgatggtgtttggatcggttcttgtgtaattattccatcaaagttagaaagaatagacaatggtgtgggataggtgcagggagagttacaacgaaaaacatctcaattacgctgtagctgacgatcctacaaagattgaaggcttaaaacttttgggataaaggaatagtagataataatacatataaatttattattaaaaggttataaattaagatgcataagattgttgtaaacggggtggaaattttcccttttagttcggaagcgcagttattaaattacgtaaatgagaggaaaggtattcttattgctattaatgctgagaaaatattgaatgctacaaaggaaactcgttatattattaatcggaatattggttattgtgacggtgctggtgcagtgatggctttgaaacggaaaggatataaagatgtttgtaaaataccaggttgtgaattatggattaagattattagtaaatattgcgaagaaaagagtttttacttgataggtgctaagaagcaggtaattgaagatgttgttgctaaattaaaagaagaatataagggaataaatatactaggatatcgtaatggttacctaaaaacggatgaggaaaaacaagcgttgattgaagatattgtgagagtaaagcctgacgtggtatttgttgctatgggatctcctaagcaagaattgctgatggaggatattcagaaacatcacgatgctatatttcagggattgggaggaagttttgatgtatataccggtcgcgttgaaagagcacctaaatggtgggtaaagcacaatttggaatttgcatacaggctaataaaggagcctaagagaataaaacgacaaatttaccttgtgaaatttgcctattggttaatgatgaataaaatatgaaaatgaaaaaagtaatgttggtatttggaactcgtccagaagcaataaagatggcgccattggtgaaagagtttcaaaagtatcctgagtattttaaaacagtcgtatgtgtgaccggacaacatcgggaaatgttagatcaagtactaagcttatttgaaatcataccggactatgatcttaatataatgaagcagggacaagatttgtatgatgttacagcccgtgtgttaaccggaatgagagatgtgttgaaggaagcacagcccgatgttgtttttgtacatggcgatactactacttcaacagcggcagctttggctgcattttatcagcaaataccagtagcacatgtggaagcggggcttcgtacacgtaatatctatagtccatggccagaagaaatgaatagacaattgacgggacgtattgctggttttcatttttctccgacggttttaagccgacaaaacttgattgatgaaggtatcgcagataatagaattactgtgactggtaatacggtgatagatgccttatatgtggtggttgaaaaaattaaaagagaagtggagttagatgaaacattgagagaaaagttaaaggaggtaggatatgatgtgactcgcttggaagatggtaggaaaatggtgttgataacaggacatcgacgtgagaactttggtgatggttttattaacatatgtaaggctattaaaaccttgatagataaatatcctaatgtggactttatttatcctatgcatttgaatcctaatgtacgtaagccgattcatgaagtttttggagaagatttatcatgtcttggaaatatgttctttattgaaccgttggaatatttgagttttgtctatttaatggagaagtctactattgttcttactgatagtggtggcatacaagaagaagctccggggttaggaaaaccagttttagttatgcgagagacgacagaacgtcctgaagcattggaagcggggactgtgaaacttgttggaactgattataataaaatagtaaatgaggtatcttctcttcttgtagatagtatcgcatatgaaaagatgagtaaagccgttaatccttatggagatggacaagggtgtaaaaggatagtaaatagacttattaaagaagtagtaaaagggtaatatttaatacttgtagttttaaaactaaattttcgtcatcatccgtcacttcaactattaatcagttatcaatcaatgagctaagagttacggcaaccagtgacggcaaagtgacggcagaataaatcaaaattttgccgtcacttttctttttatctagagtttagatatcctattgatagttggatgcttaccactaagagagtttactgaatgcttatatctagactatactgcgcgtattagagcaaatgctagtaatcttaatatgcagacaaggcttggccaatatgttttgtatggtatatgttctcgttccatgtacgtgaagcattcggaccacgtatgtgaacccatgggatcacgtacacgaaccgatgggaccacgtacgtggaacgaatttttgttactagaaagatacataaatctagtattgaaaactacttaatggagccatgtcttactattaagtcaaagagattatgtaaagttaatagtagaatttttattttggaataatactgctgaaatccttttctacctgatatttaatgactatctttgagactcataaccgtttataaatataaaaatagaataaggtagaaatgaagataacacagataagagaaacagaaagcgcagaagcaattagtgtattgaatttagaatcgtttgtagaaaaaataaaagtagagattaaagcgcgtccggtatccggatttcgtgaggctttgcattatgttttacccggtgaatcttgccatctttcgggtaaactgcctaaaataattccagctgttgcattcggacgtgtcaatggagtgaagcgtatgaaggcttataatggcattgtcgagttgagtgtcggtccccttgctggaaaagcagaaatagagatcgtcaagaagaaagcggcggaacttccgcaaactaaacttgcttttatgggatcgagcggaaagaccgtcaagatatggacttattttacccgaccggatgggacattaccacaaacacaagaggaggcagaaatatttcatgcccatgcgtaccggttggcggtgaaatgttatcaaccccaacttccttttgacattcagatgaaagaaccacttttggatcagtattcacggttgagctatgatccagaattgttttatcgggaagacgcagtacctttctatctttcccaacctttcggaatgcctgccgagaacagttatcgggagaagacgattgcagagaagtcgcctttaagtcgtgccgtaccgggttatgatacggaagatgcgttggctgtgctatatgaggctgctttgaggaaaacatttgaagaaatggaagatggctggaagcgggatgatgaattgcagccgttagtagtgagactggcagagaattgttttcattccggcattccggaggaagaagtagtgcgacggaccattcatcgctattacaggcaacaacaatcgctgctggtcagagaaatgataggcaatgtgtataaagagtgcaagggattcggtaagaaagacttgttgaccaaggagcagcatcttaatttgcaaacggaggaatttatgaatcgccggtatgaattccgatataacacacaggtgggagaggtagaataccgggatcgttgctcattctttttccgttttcgtcctgtagataagagaatacagaacagtattttgctggatgcccagagcgaggggatttctgtgtgggatcgggatatcgatcggtatctgcattccaatcgtatatctgtctataatccgttggaagagtttctttttcatttgcccaactgggatggaaaagaccggattggagaactggcagacagagttccctgtgaaaataaacattggatgatgctttttcatcggtggtttctcaatatggtagctcattggcgtgggtatgataaacagcatgcgaacagcacatctccgttattggtcggtgcgcagggtacccgtaaatcaactttttgtcgggatctgatgccaccggaacttcgcggatactatacagatagcatcgatttcggccgtaaacgggatgcggaaatgtatctgaaccgttttgcactaatcaatattgatgaatttgatcaggtgactctgactcaacagggatttctcaaacatattcttcagaaacctgtggtgaatcttcgtaagccttatggtaattccatacaggaacttcggcgttatgcttcgtttataggaaccagcaatcagaaggatttgctgactgatccttccggcagccgccgttttatctgtatagaagtaactgatactattgatacgacccgccctattgactacggacagttgtatgcacaggctatgtatgagatttatcatggagaacgttactggtttgatgatgaagatgaagccgttatgacggaaagtaatcaggagtttgagcagactccgccaatggtgcagttgttctatcgttactttagaggtgctgaggatcatgaggaaggagaatacctgtatttaatggatatattgaattatttgcagaagaaatcgactattcctttatcttccaataaggtcaattactttggaaggctactgcaaaaagcagggataccctcgaaacatacgaacaggggaaggctttataaggttgtaaaattataaaatacagaaagcatttgctggtactttagtgaccgaatgatactggtgacggcaaagctgcgattcggagtgacggcaaaatgccgggaagttttaccatcactttgccatcactgcttgttattactgctatgtgattgtatatcaatatattggctctaaaagtgacggatgacggcaaaaaacatgtttttttctttaaatgtatggatggggttaactcaatattgatacatacttttttgcataaaagctttctttatttaatttattttatatctttgctagcatatcaagattacaatcaactatttattcacataaacttaataaaattatgttcaaagctcctttttcttttgacggtcgtattcgtaggatcgaatatttcctgtctggtattatcggtggtatcgtttttggtgttgcctattctctcggtttagctactttgtttcttggtgcggctgccggttccgcgggtggttccctgtttggtatcttgattggtatcgtagcgggaatagcttccatatggttctctttggcgcagggcgtgaagcggttgcatgacttaaacaagtccggttggttgatactcatttgctgcgttcctatcatcggatgggtgttcagtctctatatgttgtttgccgatggtacggtaggtcctaatcagtatggtgaagatccgaagaatcgtatgccatatcagccgcagccaacttctgtaaatgtaacagtgaatgtgtcgagagaaactcctgctgaagcatctgccgaagaagaaaaaacagaaaaagccgaatagtctttaataagcagaaatatggttgcctcttgcaaaattcgttttgcgagaggcatttttttactacctttgaggattggtaaacagaaaaaagaagataaatatgaaaaaagtaatttgcagtgaaaaagcaccgggagctatcggtccttatagtcaggcgatagaagccaatggaatggtattcgtatcgggtcagttgcctatcgatgcggctaccggaaagatggcggaaggaattgaagaacaggcacgccagtcgttggagaatataaaacacatcctggaagaaacagggctgacaatgggaaacattgtaaaaacgactgtatttctccaggatatgtctttctttgccggaatgaacggcgtatatgctacgtattttgacggagcttttccggcacgttcggctgtggccgtaaaggctttgccgaaggatgcgttagtggagattgagtgtatcgcggttcgctaacaaatcggcgacaataaaactgctgcctcccacgaagatgaagtctttaggggggcagttttcttttgctgcccgtacggcatccactacggtagggtaggaggtgcctttcagtcccgcttccgaagccattttcatcagctcatcttccggcattgcacgtttcacgctcgctttggtgaaatagtaggtggcgtctttcggcaacagttccagaacactgctgatatccttgtcgctgaccatgccgaatacaatatgcaattcctgatgcaacttttcgtgtatatacttcaattgcttgcgaatacttttaaagccatcagcgttgtgacctgtgtcgcagatgaggtcaggatagctttggagtttctgccagcgtcccatcagaccggtcatctcgcatacattagagaatccggtatggtaatctttattacagatttcatatcccaggttctttaaaatatccagggctgccaggattgtgagacaattttctgtttgacagagaccgctcagttcgtagtataatcccgtcataaaactggaattatgaatggatattgcgtcttttcttttatccatgattctgtctatcgcacgtatggcgtcagccgggttgataagagagacaaattgcatcattttcattggaagcgtctgtatctgctgaagttttatttcctcctccaataattcctgcaaatcggctctggactctttcaggttatcatatgacaaatattgcacatgggtgaaactctttaattcttccgagaaggtgatgaaggtattcattgccttggctttcatcgtaaatactcttttcaccgctccggatacttttcccactactaccggaacatcttctttgataattcctgccttttctttggctattttagtcagtgtgtggcccagatattgcatatggtcgaaaccgatattggtaataacacacagatcgggggtgatgatattggtacagtccagacgtccgcccatgcctacctcgatcactgccacatctaccttctgatcggcaaaatagcggaatgccattgccgtggtaagttcgaagaaagaagggtgcagaggttcgaaaaaggaacggtggtcttctacaaagttgaccacatactcttcgggaatcatttcaccgttgatacggatacgctcgcggaaatcaatcagatgcggggaagtgaataacccgactttatagcccgcggcttgtagcacggcagcgatcgtatgcgaacaggaaccttttccatttgtcccggcgatatgtatcgttctgaattcttgatgcggatgacctaaatgttcgtccaatttgtgtgttgtctctaaacctggcttatatgctttaccacctatttgctgaaacatcggtgcactttcatataagtactttaaagtgttctgataatccatgttttataatatttaactccgggcaatctttattgctcgcaaaattgtttatctttagaaccatcattccaactgtaaacggaggattgatgaatgagactgcaaatatcaacattaaaatctaagaaatcatgggaactaagaaaaattttgtaattgacacaaatgttattcttcacgactataattgtttgaagaattttcaggaaaatgatatttatctcccccttgtcgtactggaagaactggacaagttcaagaaaggaaacgagcagattaatttcaatgcccgtgagtttgtccgggaactggatttgctgacaagtgacgaacttttctctaaaggagtgagtctgggagaaggattgggacgcctgttcattgtccccggcaatgtggatgctcccaaagttcatgaatcttttccggtgaagaaacccgatcatctgatattggcagccgttgaatatctggcgggtaaatatccgaagactccggctatcttagtgaccaaggatgtgaacctgcgtatgaaggcacgttccatcggcattaccagcgaagactatatcacagataaagtatccaatgtcgatatattcgagaaatccaatgagatctttgaaaacgtggatccggcattaatcgaccgtatctattcctccaaagaaggcatcgacctgagtgaatttgactttaaagacgtcattcatcctaacgaatgcttcgttctgaaaagtgaccggaacagtgtactggcacgatacaatccttttacccattccatttgccgcgtcacgaagggacgcaactatggtattgaacctcgtaatgccgaacagagttttgctttcgagatactgaacgatccgaacgtcaaactggtggcattgacaggaaaagcaggaacgggtaagacattgctggctttagcggcagctttaggcaagttgactgattataagcaagtattgttggcacgtccggtggtggcgttgtccaacaaggatatcggtttccttccgggagacgcacaggaaaaagttgctccatatatgcaaccgctgtttgacaacctgaatgtgatcaaacgtcagtttgccgctaactcgaccgaagtgaaacgtatcgaagatatgcagaagagcgagcaactggtgattgaagcgctggcatttatccgcggacgtagtttgagtgaaatgtactgtatcattgacgaagcgcagaacctgaccccgaatgaaataaaaacgatcattacccgtgcaggcgaaggtacgaagatggtgtttacaggagatatccagcagattgaccagccgtatctggatagtcagtctaatggtcttgtatatatgatcgaccgtatgaaagaccagaatatctttgcacatgtcaatctggtgaaaggtgaacgcagtcagttgagtgagttggccagtaatctgttataaataataaagaactaaaaaaaagaagaatgaagaattaccggtagtataaatgcgccggcggattcttcattcttcttttttattctttgtttctagtccttcattcttaattttctttcttaccgaaatattttaggaattgcgtacgttcgaacgtattgatgccttgaacgtctttaatattcagttttcctttgaactgagcgatgctttcgaaacctttccgttccatccatgcagataagaagcgggtggattctccgatgaatgcgttcgtgttctgatagacagcgctgcaaacttctacggcagtagctccggcaaggattgcttttactactgcttccggactggaaacaccaccggaggctgcataatcgattttgtctaccactgaggatgcgattccaatccaacggagaggagtggcaagatcggcggaagtgctgaatactgcaccggatatttgttccatattctcgatattgatatccggctggtagaaacggttgaagagaaccactgcagctgctccgttagcgtacagctgatcgatcagagctacaggatttgtcaggttgtcccccagtttcataatcaccggaatgcttactgtccgtttgatatgacgcaggatgtcgatatgacgctgctcaaatgaaccgtacgtatattgtacatccgattgcaatgccagaatattgatttccagtgcatcggcaccggcttcctgtatctgtttggcaaagtctatccattccgcatccgaatagcagttgatgctggctatgatggggatgttacactcttttttgctttccttgattaaggtgagatattcagctaatttgtgttcacggatatattcttccagataatcgcttgcttccggataaaaagcgggatctttcagttgatccgcttccagcatgatttgctcctcaaacagagatttcagtacgatggcacctgcacctgcttctgccagtctcttatttttgccggcactgttggtcagtcccgaactactgataatgattgggtttctgagagaaagccctgcgaaagtagtttttaaatcggtcataattatatctttttaaagtagttggctactgattaatagtttctttctccgaatatcttgcttcctacccgtaccagagtgcttcctgcggcgattgcttcgtgatagtcatgtgacatacccatcgacaattcacggaaagtatctgaatcggcaaaccagtttgcttttatttcctgaaagagcctattcagtaaacaaaattcccggttaatttgttcaacatcatcggtgttgcttgccattcccatcaatccgcagatgcgtacgtgagacagttctttccattcgccggcatgcagcatatccttgcattcttcggggctgaaaccgaacttggtctcttcctgtgcaacgtgaatttgtaacagacagttcacgatacgtcccgctttggcagcttgcttgttgacttccgtcagcagtttgtacgtatcgattccatgtatcatcgctacgtaggggatcatgtatttgatcttgtttgtctgcaagtgcccgataaaatgccattcgatgtctttcggcaacgtttcgtatttagctgtcatttcctgcactttgctttctccgaaaatacgctgtcccgcctgataagcctcttctatcgcttcattgggatggaattttgagacagcaaccagccggactccttgtgggagttcggccagcacttgcttaagattgtcagcaatactcatggttacttatgcttttgacggatcaaactctggtttgtcattcggtccggcactgtaaggatatacatccatcaacggggtctcggataccataccgatctggtaatcggccatcgttcctttcatgccttcatccagcttcttcactgcgtcacgcaagtcggcagcctgaaccagcacttgggtagaagtctttttctctgcaccgcttttttcgtcaagggtgataaagataagtttgcacttaaaccagcggtcggcactttcctcatcgctggggaaaagttcgctatagttggcacgtttaatgtccgatactgtaaattctcctgttataaatggagtcatctcctcgataatacgtgcttctgcttctgtaaagctgagtgcatctaccagataaggttcagtcactttcttctgcattccgttttccatcgttttctcgtaacggattttgcactcaaaccaagtatgcattgccataatttttcttcttttttagtttattgattcgtgtaaattgcctacaaagataaacaaaatacgaagtaactaccgaaagatttttattttcttttatgcagattcctcaattcgaacgaaagcatgacgcggaaaagtccgatgatgaagaaagtaaaggaaatcatgtagaccacgtacaatgcacctactgccggttgccacaatatgatgagagcacagatgatggcgaggataccgaaggccatataccagccccagtcgcgggtgccgtaacgtttgaggtcgatggaatagccggtagaggaaaagccccggaacatgagccagaaggcgatgatgaacggaatcacttccatgctgaccatcggataggcaatcaggtaaatacctaagataaggtcgataattcctcctaccagataccagccccaactcggtactcccttgcggttgctgagggagaatataatttcgagaataccgcttatcagcatcgatatgctgaaaacgatgctaagtgccacatagctgctgagaggtgagaacataagccaaagggcgacaataatatacacgattcctaacaggagagaggtccaccagttttttactgaatgtttgatctcattgaaaacagtttccatacgttctttaattttaaatgaatactctgtgaatttgtggaggaataacaaattgattttagaaaaggttttcgtgtgaacatattccggggataagttgtttttattataaagtaattttaaaatgtaaatgcaatatggcaacaacaaatttcaaaggacaaccggtgaaactgatcggtgaatttatacaagtaggtaaagtcgctcctgactttgagttagtaaaaacagatttgtcttctttctccctgaaagacctgaatggcaaaaatgtgattctaaatatttttccaagtctggataccagtgtctgtgcaacatcggtacgcaaatttaataaaatgggagcaggtctgaaagatacggtagtattggctatctccaaagaccttccttttgcccacgcacgtttctgtacgacggaaggcatcgaaaacgtaatcccattgtcagatttccgtttctctgattttgacgagagctacggactgcgtatggcagacggaccgttggcaggcttactggcacgtgcagtagtcgtaatcggcaaagacggcaaagtagcatatacggaacttgttccggagattactcaggaacctgactatgagaaggcattggcggcagttaaagaataggtaataagtattaggtattaagtaataagtattaggtaataagtattagccgaagtcgcttatttcattattggcattaattatgcggagtattacttaatacttattacttaatacctattacctattactttacattaaaccttaaccacatggacaaaattcgatttttcttcatcgccctgttaggtatgggcgctgcacacttgtcggctcaaacggccgatagtacacaaacttctccctggacaacggaaggttttgccggactcaagctgacgcaggttagtttgaccaactggtctgccggaggtgacaattctgtcgcttttgacttgcaaggtacttatcaggctaactataaaaagggaaagcatatatggaacaaccgtcttgaactggcttatggcttgaataagacaggggaggatggcatgagaaaggccaatgataaaatatatatgaataccaactatgggtattctatcgccaaaaactggtatgcaagtgcatttaccactttccagacacaattctcgccaggatacgactattcagtcaataaggatgtcgctatctccgaatttatgtctccggcatatctgactaccggtttgggattcacatatgatccgggaaagattttcacggttgtattgtctcctgcctcttggcgcggcacctttgttctaaatgaccgtttgtctgatgaaggcgcttttggtgtcgatcccggcaaacatcttttgtcgagcttcggtgctaatctgaaaggagaggtgaaatatgaattcttaaagaacatgactgtatattcccgtctggacttgtattctgactacttgcataaacctcagaatattgatgtgaactgggaagtgcagattaatatggcaatcaacaaatggttctccactacgctgactaccaatatggtctatgacgatgatatcaaaatagttcagaaagacggcagcaaaggatcacgcctgcaattcaaagaagtactgggcgtaggagtgcagtttaatttttaggtaataggtattaggtaataagtattaagtattaaaccatgcggataagctgataacacagcagcttcggttaatacttaatacttattacctaatacttattatttatttctcttcattcctttataaaccagaaagcccacgatgaatattccgattgcgatgaagcaatagccgatttcgtggctgtattctgttactttggcaatcagttgttcttcgctttcgatgccgggcactgtcgagaggtaatacccgattacggcgaggattgtattccataatccggctccgatagtggtatacaacaggaaggtgtgcattttcatgcgggcaagtcctgccggtatggaaatcagctggcgaactgccggaatcaatcggccgatgaaggtggaaagtgcgccatgcttgtcgaaataagattcggcatgttgtactttggcttcgtcgatcagacacatgtgcccgatgcggctgttggcaaatttataaataatgggacgtcccagccatttggccagataatagttgattaatgcgccgatatctgcaccgatagtggcaaataagactaccaagtaaatattaagctcatcattgacagctgctttgtatgctgccggcgggatgatcacttccgatgggaaagggatgaaggagctttctatagtcattaataaagtgattgtccaataattcagatgttcgagacaccactggataaaagctactgattccatgtgtttttgggctaaagtttattaatatgattatttatttcctttctctttcttcatgcgcttccagacttctttgagcatttgttcgccttcctccgtttggttaggtctggatagcagatccagaatgatgtcctcgctgatcggatgggcactttcactgttgtacttgaagaagtcgtctatctcgttatgcatcagactgagaatactcagtttctctgtgacgtctgcatagttgggatcaatccggtatgactcttcaaaacagagtttggcttgatataagtactctgcgtccgaataggccgaagctaccaaataccacatttctgcactcggttccatcaccagtgctttgtcaaaagccttgactgccttttttttctgaccttccttcatgtagagtttaccttctgtcagatggataccgggatcatccggctggatctttttggcttttttacataacagatgcgcttcctcatgcttgcctagttgggaggcggctacagctttgttggtataagtatctatcaatagaggagagttgccggctccgtctgctacaaaacggtcgatgacacgttggtagcaatcgtctgcttcttgccatgctcctttgttggaatatgccatccccaaaaacatgtaacccatttcgggaggaaaggctttgtattctatcgcctttgtataattctcaatggcggcatccgaattgttcagatagaaatagcaatgtccgcggtaagcgtaggcttctccaaacgtctcgtcggcagccagtgcaaagtcacaggcttcgattgctttttcactgtcttcagctgcaaagcggcatttggcaagtcccacccagtaactggcattgtaagggtccatatcaatcagttgattgtaataggtcgatgcggcttcgagttcattggtgcctgcgagatagtctgccatgacagctatgaaatcttcttttttaccgaatcggggggtacctttatccaaccattccttggcggcttcggggtatcccatatccatatagagatagatgatgttaataattgtttccagttcatccgtatcttctatggtatctaatgtgcttcgggctgcttccagttgtccttcgttcagcagaagttccgctttcagcatttttacatcagtaatataatcatctgtgatgctttctgcaacttttttcgccagaggtattttaccggtatcaagataaagataggcctgctctaccagtagatctgtgctgtcgggatgcaggtggaggccgtaagttatgacctcttgcgcttcgtcgaatttccgttcggcagcgtatcggtcagcaatgtcggctagttggtctccgtccagatagagttgtcggttttctgcttttgccgtttcatattgagcgattaactcgtttagttctttatttgcggacggtgaattttttctccccattctgatttattttgatttgaataaagcagcgctaaaaagatgtttaggcacggattacacagattgaagcggcttgtaagttacgtgaactctttaaatccgtgcaatccgtgtaatccgtgcctgaataatatcatagatttattccttattcggcttttggcactgcctttttatgtttaagtagcctgtgagggctgaattttatttattgattttgccccaggtatcctttaatcctaccgtgcggttgaatacaagtttctccggagtcgagtctttgtcgatattgaaataaccgatgcgttggaattgcaggtatgagagcacaggcaaggttgccgcaaacttctcgatatagcaattcggcagaactttcaaagaatccggattgatgatttccttcattgcttccagagcttcgcagttctttgcttcacggatggcagccagttcgtcgcgtgggttttctactttccacagacggtcgtagaggcgtacttctgcttgcaggcagtggttgcagcttacccagtggagcgtacctttcactttgcggttggcatccggcataccgctgcgggtgttcgcgtcatattcacaatatacttctgtgattacgccgttctcatccttcttgcatccggtacattttacgatgtaagcgtttttgaggcgtacttcctgtcccggagtcatgcggaaatatttcttgggcgcgtcttccataaagtcttcgcgttccatccataattcacggctgaactcgatcatgtggcttcctgcttccggatcttccggattgttgatagcttccagttcctccacttgtccttccggatagttggtgatgatgagtttcaccgggttgatgacagcagatacgcgggtagcacggctgttcagatcgtcacgtacggaactttccagcaatgcgatatcgttcagggcatcgtaagtcgtataaccgattttatcgataaatttatgaatagattccggagaataaccacgacggcggaagccgcagatagtcggcatacggggatcgtcccatccgttcaccaatccttcttttaccagcgtcagcaggttgcgtttgctcatcagcgtgtagctcaggttcagcttgttgaactcagtctgacggggacggttgtcgttcagatccttaccttctttcagccagtcgatgaagagatcatagagcggacggtgtaccacaaattcgagcgtacacagagagtgggttactccttcgaagaagtcactctgtccgtgggcgaagtcgtacatcggataagccttccaggtagtacctgtgcggtggtgcggatgcttcacgacacgatagatgatcgggtcgcggaagtgcatattaggattggccatgtcgattttggcacggagtaccatagcgccttcttctatctcaccgctgttcatcttcttgaagagttccaggctttcttcgattgggcggtcacggtacgggctgttcacacctgcttgcgtgggagtacctttttgctgggcaatctgttcagctgtttgctcgtcgatatatgcttttccttcctcgatgaggcggatggcgaagtcccataattgctggaaatagtcggaagcgtagtattcgtttccccattggtagccaagccattgaatatcttctttgatggcttctacgtattccacgtcctctttggtcgggtttgtgtcgtcgaaacgaaggttacatacaccgccatgtctggcagcgatgccgaaatcaaggcaaatagctttggcatgaccgatgtgaaggtatccgttcggctcgggcgggaagcgggtctgcacttttccaccatttttaccttccttcaaatccttctctactgcctgttcaataaagttcaggcttttcttatcgcctgtgtcttcgtttttaatatctgtcataacgttaaaatgttaactctatttataggctacaaaagtaggacattttttttattttactggaatataaccgctcttttttataatctcctgtccttcgggcgaaagaatgaagttgatcagaggagctacctgctctttgttcttcacattataatagtaataaagggggcggacaatgggataagtcttgttcgttgcgttctccactgtcggggcggcgtagtggcttccgtcatacgaaacggaaagcgttttggtgcggggagatacgtatgccagcccgacgtacccgatggctcccttcgtctggctgacggactggatgatagcacctgtggcgggcatggaaaggctgcctgccatatagttcttgtttttcagcacgttttccttgaagaattcgtaagttcccgaagaggtttcgcgggaatagacaactattttgcggtcgtctccgcccacttgcttccagttggtgatttttccgcggaagatatcttccagctgctggcgggtgagctgtttcaccggattggaagggtgcaccactacggcaagggcgtcgtaggctacgatcacctcgtccacctcttgtccggcttctttggttttcatcttttcgctgaatttgatcggacgggaagccatggcaatatccgtcgtattatccatcagtgcggagatgccgaccccggtgcctcctccggtgacagtgacccgcgcatccggatgctgattcataaatcgctctgctgtttgttgggcaacaggcaatacggtgtcgctgcctttgatacgctgtgcgttggcgctgagagacagaagggaaagggcgattaataaatttcttctcactttcataattattctttttattgttggtgcaaataaaacaatcgcatattacatttttgtttcagataagggagaaataatgtttgtaacacaaatgtaacagcattgaaatacttccttcaaacgttagtcacacctccttaataaggagttgctttctttgcatcagaaaaccaataggtatgaagaagatttttgagaaaataatagaaggaattctgacttgtagcggtttcgtaacaagtattacaatcctgctgatcgtgcttttcctgtttacggaggctttcgggctgttcaatagcaaggtgattgaagaagggtacgtgttggctttgaacaaaggcaataaggtaaatacgctgagtcctgctcagataaaggacgttttcgacgaggagataacgaattggaaagaactcggtggggaggatctccctatccgggtttttcgtttggaagacatcacggagtattatacggaggaagaactgggtccggcttacgagtatgctggcgaaagaatcacgcagttggtggagaagacgcccggtatcgtggcttttgtcccgcagaaatttatagtgcagcccgatgcagtgcattttatcaaggataataccatttcggtaaaggatgtctttgcgggtgccgaatggtttccgacagcgactcctgccgccttattcgggtttctgccgttgatagcgggtaccttgtgggtgagtctgttcgctatactttttgcacttccgttcgggttttcggtatctatctatatgtctgaggtcgccaatccgaaggtgcgtaactggctgaaaccgattattgagctgctgagtggtattccttcggtggtttatggttttttcggcctgatcgtcatcgttccgctgattcagaaattctttgatctgccggtaggggagagcggtttggcgggaagtatcatcctggctatcatggcgctgcctactatcataacagttaccgaagatgccatgcgcaattgtccgcgttcgatgcgggaagcaagtctggcgctgggagcttcgcagtggcagactatatataaggtcgtgattccctattcgatctccggaatcacttctggcgtggtgttgggcatcggacgtgctatcggagagacgatggcagtattgatggtaacgggtaatgccgcagtgataccgacaacaattctcgaaccgctccgcacgattccggcaacgattgcggcggaactgggagaagctccggcaggaggaccgcactacgaagcgttgttcctgttgggtgtcgtactgttctttataacattaatcatcaactttagcgtggagtatatctcttctaaaggaataaaacgtagcaagtgatatggaaatacgaagtaataataaagcgaaacaccgttctcagaggctggctttcggaattttccggttgttgagtctctgcatagtgttgattttgtttgcgattctcggtttcattatatataagggagcgggcgctatcagttgggagttcatcacttcggcacctacggacgggatgaccggcggaggtatctggccggctattgtcggtactttctatctgatggttggcagtgcgcttttcgcttttccagtgggagtgatgagtggaatctatatgaatgaatatgctccgaaagggaagctggtacgttttatacgagtgatgacgaacaatctgagcggtattccttctatcgttttcggtctgttcggtatggcgctgtttgtcaattatatgggctttggtgacagtattctggcgggttctttgacgttaggtttactttgcgtacctttggttattcgtactacggaggaggcattgaaagcgattcccgacagtatgcgtgaaggaagcagggcattgggggctaccagattgcagacgatctggcatgtgattcttccgatggggatgccgaacatcattacgggattaatccttgctttgggacgtgtttcaggcgagacggcaccgattctgtttacctgtgccgcttacttcctgccgcagttgccgacgagtattctggaccagtgtatggcgctgccgtatcacctgtatgtgatttcgaccagcggaacggatatggaagcgcagttgccgttggcttatggtacggctttggtactgattgtgattatccttctggttaatctgctggcaaatgcattgagaaaatatttcgagaaaagagtaaaaacgaattgataagtatatggatacaataaaaatagatgcgcgtgatgtaaacttctggtatggtgattttcatgccttgaaagggatcagcatggagattgaagaaaagtctgtagttgcctttatcggaccgtcgggatgtggtaaatcgactttccttcgtcttttcaaccggatgaacgacttgattcccgctacccgtctggaaggtgaaatccggattgacgggcataatatttatgccaaaggggtggaagtggacgagcttcgcaagaatgtgggcatggttttccaacgccctaaccctttcccgaaaagcatattcgagaatgtcgcttacgggcttcgcgtcaatggagtgaaagataacgctttcatccgtcagcgggtagaagagacgctgaaaggggctgcgctttgggatgaggtgaaagataaactgaaagagtctgcctatgctttatccggcggacagcagcaacgtctctgtattgcccgtgccatggcggtatctccttcggtactgttgatggatgaaccggcttccgcgctcgatcctatttctacggccaaagtagaggaactgattcatgaactgaagaaggactatacaatcgtgatcgtaactcacaatatgcagcaggcggcacgtgtcagtgacaagacggctttcttctacttgggagagatggtagagtatggtgatacgaaaaggatattcaccaaccctgagaaagaggctacccagaattatatcacaggacgtttcggctaagcgtcaccggagtgtttgtgaaaaacgagaatattaatcatttatatataaatagactatggtaaagtttatagaatcggaactcattctattgaagaaagaagtagatgaaatgtggacactggtgtacaatcagcttgaccgtgcaggggaagcagtcatgacacttgacaaggaactggcacaacaggtaatggttcgcgaacgtcgggtgaatgcctttgaactgaagatcgacagtgatatagaggatatcattgcattgtacaatccggtggcgattgatctccgatttgtgttggcaatgctgaaaatcaatacaaatctggaacgtctgggagactttgcagaagggatagcccgtttcgttattcgctgtaaagaaccggtgctggatgccgatttgctgactcgtctgcgtttgggagagatgcaggcagaggtattgtccatgctggaactggcaaaacgtgccttgaacgaagagaacattgaaatggcaacggcggtattcggcaaagataatctgctggatgatatcaatgcggaagccacaggcatcttggcagattatatccgtgaacatccggagacggcgcatacttgtgttgacttggttggtgtgttccgcaaactggagcgttcgggcgaccatattactaatatagccgaagaaatagtcttctttattgatgcgaaagtcttaaaacatagcggaaaagtggacgaaaactacccgaaatcgtaattttttgcatgtttttaaacaaaaattagggctacttagaaaataatcctatatttgtcccttgtaacggacaagttatgggcggttttgcgtcaaatgataataaatccaaagaaatttcaaaaagatgttatatgacatgttttataatttggagagtatcagtaaaagcgactatatttgcaccgttatcctgaaaacaatctttttaccttaaaaaaaaactaatacctattgaaaactgaaaaatggagctttgtgaaaagccccatttttttttgctcttattttttaagctccttccttatttgtatctttgagccgtactaaaataaataacattatgttttctggaatcgtagaagagtacgctactttggtagcactggtgaaagaccaggagaatatacactttacatttaagtgttcgtttgtaaatgagctgaagattgatcagagtatttctcacaacggagtatgcctgacggtagtgagtctgaccgatgatacgtatacggtaactgccatgaaagaaacgctggatcgttcgaatcttggtttgttgaaagtgggcgataaagtgaatgtagagcgcagcatgatgatgaatggccgactggacggacatattgtgcagggacacgtagaccagacagctacttgtgtggaaatcaaggatgcggaaggaagctggtattttacatttaaatatgcatttgataaggaaatggcgaaacgtggctatatcacggtagacaaggggtcggtgactgttaatggtgtcagtctgacggtatgcaatccgacggatgatacttttcaggtagctattataccttatacttatgaatataccaactttcatacatttgaaatcggtagtgtagtgaatatcgaatttgatatcatcggtaagtatatcagccggatgattcagtatagataattaaaaaatagatgtctgatggattttctgcaattggtactgtctcgtcagagtgaccgggcgtatgataaagagcgtccggtagaagcggagaagctggagcgcattctggaagctgctcgtctggctccttctgcctgcaatgcgcagccatggaagtttgtggtcgtgacggaccatgagctggcttcaaaagtggggaaggcggcagccggactaggcatgaataagttcgccaaagatgcccctgtacatattctggttgtagaagagtctgccaatattacatccttgcttggaggaaaagtaaaaggcaagcatttcccgctgattgatattggaatcgctgctgctcatatcacattggctgcagagaatgaaggactgggttcctgcatcttgggctggtttgatgaaaaagagatcaagcaattgacaggtattcctgcttccaaacgtttattgctggatattgcaatcgggtatccggtgaaagagaaacgaaagaagatgaggaagccgaaagaaaaggtcatttcttataatcaatactaattgaaaaaagattactccttggacttgccggagtagatatacagtaaaaagcctcgttggtttaaaaggaagaggtcgttcctttaaaaccaaggaggctttcctttaaaaccaacgacctgtttcttttaaaggaaaaagtagaagtctttaatctcttgattatgagatatttgcctgaatgtgattctcgaaattgagaattggtaaaaaacaaagacgtttatgggaatttctataggtctttcagtagcactttgcttgccttcttatagtattcttctctggattcagtcagtactttccattcgtcattaaactcctcatccttgtcgatcttgaagttttcggacccataagtatccagtcggtcgagcaagatggctacattcagttggttgatatccatagagggctggtagccgatatcttcacttttttggtcggtcactacctcgtggatcaagtctatttcttgtaattgatagagtacctgattagtcagccggatggggatttgatgctcttccgatatttctgctgctgtatagggcggttcattcttttcgaaacgtttggcgataagcgacatgatcaggatagagataaagtcccggtaacgtctgctgatgttgcgggtatcctgatcgaaactaaagctgcggatattttgtccggcatacgtcaattcagctccgaacagacagatggtccatgagatttgcagccaaagcagaaacaaggggagggcggcgaagctaccgtagatagcattgtatttcgatacccataactggctgttgatatacaggaactggaaggcctgataagcggaacctgccaggatacctgcaatcagagcgtgcttgaattttactttcgtgttgggcatgaagatatacagccctgtaaacatcagccaagtcaaaacaaatgggataaggcggatcatgaacttcatgacgggagccagtaaaacgaaatcgtccatctgcttcagcacggtactcacaaacagagaaagaccgcccgataccacaatcagaatcggcatgagcaggaacatggagaaatagtccgtaatcttccggtacatggaacgcgccttctttacttcccaaatacggttgaaagtgatttcgatattgctcaccagattgatcacggtccatagcaacatcaccagacctaccccaatgaaaataccgcctttggtttgcgagaggtaggagttgacgaaagaaagaatagcttccgtcgtttctatatttcccccgaagccgcttcgaaactggtgctccatcagattatcaaatccgaatccgcgggccacggcgaataggatggcgagtataggcacaatagcaagcagtgtgctgtatgtcagtgctgaggccttgtttgccatccggtctttagtaaatcggttgatacagagatagatggttttgataatattgtagagcgagaatttcgttctagtcacttcatcttccgtgatgcgccagatgtcatacgtgatgaatttccatatatcggtgattttcttcttcatggctcagaattttaaaaaagcagtttaaaaaagaaaaaaagcagtcagcctgtaagccgagttctgtaccttatagatataaggtgcctgtcatttatctgagtggcgtgtcaccacgacactttagcggtctaccctccgacatggagcgagcagctctcataacgccggtttacatgaccttacaactcctaagacgtacagcccgtatgtcaccatacgactggtaggctcttaccctaccttctcacccttacctctccccgaaaggagcggcggttattttcttctacgttactctaccctcacggacagctttctgttaggaagtaggatgctctgtgttgcccggactttcctcctgcgcgaaacgcgcacgcgacagaccggccaactgctttagactgcaaaagtacgtcatttattttgttttagccaaagaaagtgtcacaaatagaaataatttctacctttgctatcattaaatcatgattcaatgaagaaaaatatcctttttttctattgcttgctggtagtaacggtagttagtctgaaagctcaggaaatacgctccatgcctgctgattcggcttatggggtagtgcacatttctgtttgtaatatgcgcgatgaaggtaagtttacatccgggatgagtacgcaggcgttgctcggaatgccggtcaaggtattgcaatataccggctggtatgagattcagactccggatgactatacgggatgggtacaccggatggtgattactccgatgtcgaaagagcaatacgatgaatggaaccgtgctgagaagatcgtggtgacttcccattatggatttacgtacgaaaaaccggatgatgactctcagaccgtatcggatgtcgttgccggcaaccgtctgaagtgggaggggagcaaagggcgcttttacaaagtgtcttatcccgacggtcgccaggcatatatatccaaacatatttcacaacccgaaacgaagtggagagcttcattgaaacaggatgtcgaaagcattattcaaaccgcctatacaatgatcggaatcccttatctgtgggcgggaacttcttcgaaaggagtcgattgcagcggtctggtccggacagtgctttttatgcacgatataatcatcccgagagatgcgtcgcaacaggcttatgtaggcgaacgcattgaaatcgctcctgatttctccaacgtgcaacgcggagacctcgtctttttcggtcgcaaagccacagccgaccgcaaagaaggcatctcgcacgtcggcatctacctgggcaacaaacgcttcatccatgccctgggagacgtacatgtcagcagctttgatcccgaagacgagtactacgacgagttcaacaccggccgtctgctttttgccactcgcttcctgccttatataaataaggagaaaggcatgaataccactgaccataacccctattatctatatgactaatcattatcaattatccattatccattcaacaaatgccaaatagaagagatttcctgaaaacggccgcctttgcaactttaggctccggaatagctgtcagtcaggtattggcgggagaatctatagcttccaccattcatataaacaaacagggtatgggaggaaagatgaaaatgacttttttcccttatgagttaaagttgaggcacgtctttacggtagccacttattcgcgtaccaccacacccgatgtgcaggtagaaatcgaatatgagggagtgaccggatatggagaggcgtcaatgcccccttatcttggggagacggtggagtcggtgatgaatttccttaaaaaagtaaatctggagcaattcagtgatccttttcagttagaggacattttgtcatacgttgacagtctgtcgccgaaagacacggcggcaaaggcagcggtagatattgcccttcatgatttggtgggaaaactgctgggagctccgtggcataagatatggggattgaataaggaaaagaccccttccaccacctttacgatcggtattgatacgcccgatgtggtgcgcgccaaaacaaaagagtgtgcagaccggtttaatatattaaaggtaaagctagggagagacaacgataaggaaatgatagagacgatccgttcggtgacagatcttccgattgccatagatgccaaccagggatggaaagaccgccaatatgcgctcgatatgatccattggctgaaagagaaggggattgtaatgatagagcagcccatgccgaaggaacaattggatgacattgcctgggtgacacagcaaagccctctgccggtgtttgccgatgagtcgttacagcgtttaaaggatgtgcccgctttgaaaggcgcgtttacgggaatcaacatcaaactgatgaaatgtaccggtatgcgtgaagcatggaagatggtgacgctggcgcacgctttgggaatgcgcgtgatggtgggctgcatgacggagacttcgtgtgcgatatctgctgcctcgcaattttctccggcggtcgattttgccgatctcgatggcaacctgctcatctccaacgatcgctttaaaggggtagaagtggtgaaggggaaaatcaccttgaatgacttacccggaatcggtgtcatgaaaatctgatcttactgaatgaatgtcagactgttaaagccatctgacatacaacgaatgtaaatttgtcagttgctgtcgttaagcgctgttaagcctcaaatattctctgttaaaagaggacaaaaaagagtgacaagtagaataagtgaacgatatttgttattattttaacgtcgtaaaagttaaaacaatgtcgaatattaacattttaaagaattataaatcatgaaacagacaacaaagaacattctgggagtaggagctattattcttcttagctcaggagttgcaggattgacaacttacaaattgttgcaatccaatgatgctgccaaagagacatcttttaatgagatgttccagcagaatcccaatgtcaaattggctgcttttgacgcggtaaacgctcaaccggttgacttgacacaagctgcggagaattcgcttcatgctgtcgtacatataaagtctactcaggaagctaaaacaagaaccgttcagcaagcgccggatatttttgacttcttctttggagacggacgcggacagcagcgtcaggtacaatcccagcctcgtgttggttttggttccggagtcatcatttccaaagacggatatatcgtaaccaacaatcacgtaattgaaggtgccgatgagatcagtgtgaagctgaatgataaccgtgagttcagaggacgtgtgatcggtactgacccgagcacagaccttgctttgatcaagattgagtctgatgatgatctgcctactattccggttggagattccgaaacactgaaagtaggagagtgggtactcgccgtaggaaaccccttcaatctgaactctacagtgacagcaggtatcgtaagtgccaaagcccgtactttgggagtatacaatggcggtattgaatctttcatccagacagatgccgccatcaaccagggaaatagtggtggtgcactggtgaatgcgaaaggcgaactggtaggtattaactccgtgttgtcttcacctacgggagcatacgccggatacggctttgctatccctaccagcattatgactaaggtagttgccgacctgaaacaatacggaacagtacagcgtgccctccttggcatcaagggagcttctttgggcagcagcatcatggaagatcagagtcctatcgataagtccggtactacactgcgtgataaagcgaaagaatttggcgtggtagacggcgtatgggtacgcgaaatcgttgataacggttcggctgccggtgctgatatcaaggtggatgacgtaattgtcggtttagataacaagaaagtacataactttgccgacttgcaggaagcattggctaaacaccgtccgggcgataaggtaactgtgaaactagttcgtgacaagaaagaaaagtcagtagaagtgacgctgaagaacgaacagggtactaccaagatcgtgaaggaagctggtatggaaattttgggtgctgcattcaaagaactgccggatgacttgaagaaacagctgaatctcggctatggtctgcaagtgacaggcgtttcttccggtaagatgtcagatgcaggagttcgcaaaggtttcatcatcctgaaagctaacgaccagccgatgcgcaaagtaagtgatctggaagaagtgatgaaagccgctgttaagtctccgaatcaggtattgttcctgaccggcgtattcccgtccggcaagcgcggatactttgcagtagacctgactcaggaatgagttataaattaaggtaagaagattgtaggataagctaatgaaatagaaaaaggatgccgtcatacaacttgtcggcattcttttttgttttattagttgaaaatatagtgaaaaagttgcctaaatatgtatgttaacaaattatttgtcgtaactttgcactccaaatctgtttttaaagaatgagacaactaaagattaccaaaagtatcactaacagagagagcgcttctcttgacaagtatttgcaggaaatcggccgtgaggacctgataacagtcgaggaagaagtggaactcgctcagcgcattcgtaagggtgaccgtgtagcattggaaaaattgacacgtgccaatcttcgtttcgtcgtatctgtggccaagcagtaccagaaccagggtttgagtttgcctgacttgattaatgaaggcaatttaggactgatcaaggccgccgaaaagtttgatgaaacacgtggattcaagtttatcagctacgccgtatggtggattcgccagtctattctgcaagcattggcagagcagtcgcgtattgttcgtctcccgttgaatcaggtaggttcgctgaataagatcagcaaagccttctcaaagttcgaacaggaaaacgagcggcgtccgtctcccgaagagttggcagatgaactggaaattccggttgacaagatctctgatacactgaaggtatccggccgtcatatttcggtggatgcgccttttgtggaaggagaagacaacagcctgttggatgtgttggtaaacgacgattcgcctatggcggaccgctctctggttaatgagtctcttgcgagggaaattgatagagctctttctacgttaaccgaacgcgaaaaagaaatcatacagatgtttttcggtatcggacaacaagaaatgacattggaagaaatcggcgataagtttggcctcacacgtgagcgcgttcgtcagattaaagaaaaagcaattagaagactaagacaaagtaatcgtagtaaattgctcaaatcctacttgggataagtgaggaatatcagtttctgaaaaaaaagaattagggtcgcataagttgcacttcttggagtaatcatctgaagaatgtacttatgcgacttttatttagccgttattcgtcaatactatactatgcacaattttatgaagaagtctgctctgatattattcacgcttgttggtctgaacattggcatcgtagccaaagccgaacaacccttacgggaaaaagctcttgcagcgaaaacctattgcgtagagaaagggtttaatacgaattattgctttctggtagatttcagcattccttccggcaaaaaacgtttctttgtctgggatttcaaaggcgattccatcaaatattcaagtctgtgtgctcatggatatggtaaggagagcacgccgaagaaaccggtatatagtaatgtggaaggcagctattgctcttctttggggaagtataaggtaggaatccgttcgtatagtaaatgggggattaatgtacattataaactgcatggattggaatcgaccaacagcaatgctttcaagcgttacattgtgctccattcgtatactccggtaccgactttggagatataccccatgcatcttccattggggattagccagggatgtcctgtgatctgtgatgacgcgatgcggaaggtcgatgcactgctgaaagtcgagaagaagcctgtgttgctatggatatatgaatagaaatactaaatcttaatgataaatagatgatatttcctcttttttgttacctttgccacaattaaaaatttatgatatgaaatacgtaaaaatactatttgcaatggcacttgtgttgacaatgtgctcggctttctctttaaagaaagaccactcaaaaacagtttatgccttcggaattgccgcttcctttacggatacagtcgtgtattttacggatattcaaatattggatagcgcaaaggttagcaaggaaggttttctgactcatcgtgatctgtacagctatcagttgaagaattatgtggaagataacggactgcaacagaatagtacctgtatgatctatttctcagaaaacaggaaaaaactggagaaagaggcaacgaagattctgagtaaatataaaaggaacaggaataccacagtaacacggattgatactgataaattccactttataaaaccggaagagtaaaagattaattgttaatatgataagagatgcaggtttgcatctcttatttttttatctttgcagccgtaactaattggtaatctaatgaaaaagattaaaatattatctcttctcatgggtttggctgcgttgtttgcagcttgtgagaataatgaaaacgaaggtcctgaaggacccgaaccacgtgagcaggtaggacgtacagtgttggtctatatcgtgggggataatggagtcagtgagttatcaagcctttttaaagtcaactttagcgatatgaaggcgggtatggaagaggttgattattccaagtgtaatttggttgtttatagtgagatggtaaatgacgttcctcacttgatttcattgaaacagaagaatggtaaagtagtggccgatactctttttacttatgatgaacaaaatccgctggataaggaagttatggccagtgttatttcccaaacagttagttatttcccggcagatagttatgggtttgtatttttgtctcatagctcttcatgggtgccggccagtaataatgcgaactctcgctccatcggatattatcgtaggactcagatgaatataccggatttccgtgaagcattgtcctctgcttttccaaaaccattaaaatttatattgtttgactcatgtaatatgcaatctgtggaagtcgcctatgaacttcgtgactgttccgaatattttattggttctcctacggagattccgggaccgggtgcaccttataaggcagtagtaccggaaatgtttactgaaacaaatttggcgacgaatatagcagaggcgtattatggatattatgaaaaatcttatacaggggttgctcctgttagtaatgagaattggacgggaggagttgctacttctgtgataaagagtgcggctttggataatttggcagcagcaaccaagacaatcattcctaaatatattcaagagaaaagggaagtagaccgtagtgatatactagcttatgattttaacgatgacgctaattatgattttgaaaaactgatccgaaatttgacaggtggagtagataatacggattatcggtcttggtatacagcctttgaagcagctgttgtatataggaaaacaactctcaaaaactattccggtatcattcatagaatgtttactatggaaggttcggaaggactctctacatatatacctactggcgcaagcaattctactatgaatactttctatcgtactttgtcatggtacactgctgccggatgggatggaactggatggtaagaataaagtcagaataaaaagaaagtgtgccgccctgaagcagcacattttttttatctcccccctacaaccattcatactccttcctcgcaacctccggacacttgattcagacatccgcacttaactgataatgccctacgattttcgcctgtggaaataacagtttcagttctcctaatatccgtagtagcgtttctttttgttacgtcgccgtgtattcattggtgctaccccctccgggtttctcgtcaagtttcggagaatcttcgttttcttcctcagcatccgctttgtagagagaatatttcatcaccttacacatatgttttattaaaacgctgcaaaggtaaaaatcgtttgcaggtgtggaaaaaccgtgaagcaccgcattggtaataagggtaaggagagtacattcctttttatttcgacaaaaaaatcggttgaacattgtgtagggtagttcattttatatagtttatggcgaaaaaagaatctcaattatgaacttaaaaagaaaggattatatgaaacagcatagctttacagactttgtttacgaagttattggcgagttgcggcaagagaaccgttttgcgacggcctatatctatcactatgccttgcaggcattcaccgcttctgtaggtggtggcaaaatattttggggaggactgaaccgaagaagcttgtgtaaatttcaatattatctggagaaagagcagaagagttataacacaacttctacttatatccgtgcgctgcgtgctatttataaccgtgcggtagatcgtggggttgtggcgggagaatgtcgcctgtttgtcaatctcaaaacaggggtatcttccgaacataaattggcattaactgccgggcagacgagccggttgctgggtgatgttgttgacggaaagtattcttccggcagactctccagtcctgtactccctccggaggtgtaccgggcgcaggacacaatgcgattgatgctgttgctgcaagggatgccttttgtagaccttgctcacttgcgcaaagtggatttgaaaggggacctgctgatatgccgacgccaaaagacgggtactgaactttgtgtcaagcttatgccgcaggcacgtcagcttatcgaacgttataggagccgggaagaatcttcgccctatctgttggatatccttactcccacttctttcgatagagaagcttttgatgattatcgccgttgcttgcgtaagctgaacttcaacctttcgagactacccggactgatgggaatggaggaggtaaaagtcagttcctatacttttaaacacaaccaattctctatctaactgaaaataaaatagttatcactcactttgtagataataggtaacactttagaaacgagcgaattacaatattctgttttattctgcatcaactcaaagaagctttttttcaggacaaaaataccaaagacgctgacaattagcaaatatctccggtaagatttgcatgttttaactccgtttttcatcttcaattaaaaagatcgaggttttcctgcatagtgtcgtggcgaaagagaccggcaatatcttctgaatgaccgacagatccctattctccaaccccaacaagtttagttgtacaatggaactaatagagaaggaggtcaataactccagaagaggatttcattctgcatttcaagaacaaatacagcaatacttatcctcttgcatggatgcttgtggacatgttgtcaatgggcatcgtaactagcatccatgaaaatataaaatccaatccattgaaaaaagattacggtgtgctatgatctatccgttcccgttttcacttcgtggctgacactcataatccttataagaaattcctgctgtcatcatacaagggtataaaacaagcagtacgccatcaatccgatggtagtccggaggatgcaattcccttggataaacgatatgatatcactacacaggacattttatgaaatctgcatcatttagtggtttatcaacattatatcgctggacaacgatatgaaacagcatttccaaaagttactgggttaatatccgaaatattgacagcaagtcaatgaacattcccctggattggcaggatgagcctttgcggagaatataaaatccacctttcatctatatttcttttgtaaaaagaacagatgttggaagatggttgctcctgctctatacggataaggcacaagaaacttaaagtcagacttccttgaaccacagatgttgcaaccaccacagttattacaatatttttaatttcatttataaaaagacttcctgcttcttggctttattggagtcttagattccttcatttatatcttaaataattcagcttgcatatcctcccactcccaataacggtgttgttcgcaatcctgcaatttaatcttagattcaagaagttctttttcttcttcatttattttacaggagtgttccaactttcttgatgaccttattgagtgcttataaccataataaatacaattttagtaatgttacaggattatacggtggtctcccttctgattgaagtttgacatgtttaaccccaagtttatctataggcaagatatccacaaataaatcgataatccttgcccaagaatctggagcaaccaattgttcaagagttatcatttgaatttgattttctgtttcctcctactatgtagtttatagatatattgtttagtttctttccataaatatacgaagaaccaataattcaatatagcgtctaaggtttttgcacagactctcggtggaatacatttccatgatatctgctccataacgaccgtgatgttcgtgcagcattctttcgaatgcactgattacaggccgtaccaccgtacagaaaatatcatccttacttttgaagtagttatagatattgctcaaccctacctgtgcttcttgcgcaatttcacgcatggaagccttcggaaagccgttttcgaggaataccttttcggcagctttcaaaatttctttttgtatgtcatctttagagtattgcataagttttatttctcgactgcaaagtaggggagaatccgcgttttctgaaatacccattaatgatggttttttgttagatttttataaaaatcacaattattgggtattgccaaggtcgctgaaagcatgcaactttgcgcgtataatctaactataaactactatatggtgaaactaacgaatcataaaaagacaattgacagacctttaggttgtaagagatggggaataatagctattattattatttttgcaggtagcttatcttttttactgtactcttacttttcgcatgatgctgataatcctcagtgtaactgtttgctatgtatgcttaatcatgttcctgaagagggagagtacatttataaccgctatttgatatttattagttttatctggattgctgtgatctttgcggctatctttttagtgaattactgctttgtaaaaaagaacaaaaagaaatagtgttcgtttaagtacctacttattattatttttaataacacaatactcatatttgggtattgcccgcctttttaactccctctacctttgcgccaacaaaatttaagataaaagatgaaaaaattaacttgcttattcgccttaggtttcttgctttttaacaatactttacgggctaatgaacccgaaaaagtaacctcaacagaagaggtatctgaaactgcggcaaagaaagagagaataaaacaggtaacaaaagatgacgactacgaaaagttccgtttcggtggatacggagagatggtagcaaagtttatgaattacggaacgaatcgtttctatggtggggtcgataacagtgatcaccgcaataccattgcgattcctcgttttgtgttggcttttgactacaagtttaattccaagtggatactgggtgctgagatagagtttgaagcaggaggtgtaggtcttgaaactgaacttgagaattcagaaaacggtgagtatgagacagaaatggaaaagggtggagaagtcgctcttgagcagtttcacattacccgtctgatacattcggctttcaatattcgtgccggtcatttgattgtacctatgggattgaccaatgcacaccatgagcctatcaacttctttggaacatctcgtcctgagggtgaaaccacaattattccttctacctggcatgagacaggattggaattcttcggttcttttggtaaaggatatgcgcgttttgattatcaggcaatgattgttgccggcttgaatgctgatggttttggtcgcgataactgggttgccggtggtaagcagggactctttgaacaagataactttacttcacctgcttatgtagcacgtctggactataaaggggtatcggggttgcgtgcaggtgttgctttttactattgtaatgacgtgacggccaatgctgataagaattataagtatagcagtgtaggccgctcatcagtgaaaatttactctgccgatgcacagtataaaaataaatatgttaccgctcgtggtaatatcatttatggtgatttagagaattcttccaagatcagcaaggttactctttccaataactccaattattatcacggtgctatgcgtaatgtagctaagaatgccctgtgctatggcttggaggctggtcttaacctgagtgctttcttctcgcagaagaaatgtccggttatttatccttatgcccgttatgaatactacaacccgcaggaagaggcagaaggttctgctacaatggagaagcgctgtcaggtaagcaaatggacggcaggagttaactggtttgcattgccgaatctggttgtaaaggccgattatactacccgtcatattggtacgaacaaggtatttggatcgactaaatataacaatgaaaatgaatttgctatcggtatagcttatgtcggttggtttaccaagagatagttcaaataggtatttataattaatttaatgtttaagtaatatgaaaaagtttttttatttgtcggctctttcattgggcatgatgtgttccattacggcttgtagtgatgatgacactacgactatagacgctaaaaatcttgactatacggcggagaatgcaagtagttggggaaattacatgcgagtagttgcacaattgttggtgaatgatgctactgctctttatgatgactgggcggttaaatacaacgaaggtggaagttatgcagatttctttaagaatcaagatgctttgacgagtgttgagcagttgattgacggctgtgtagacattgccaatgaagtaggtactgccaaaattggtgacccttacgatcttttcatacataataatgaagaaaaggctttgtatgctgtagagtcatggtatagctggcattctcgtgaagactatcgtaacaatatctattctattcgcaatgcttattacggaacacgtacaggggctattagcgagttatctctctcaaaagcagtagccgcggtaaatgctaatcttgatactgaagtaaaaaaagcgattgatgacgcagcagcagcaatttgggctatcccgagtcctttccgcaacaatatcaatagtccggaagcagtaagtgctatggaagcttgtgccactttagagggagtactcaagggtagtttgaagagttgtatcgaaggtattgataaaacagtgttggctgaagtcgtaaaaaattatgtggatgtagttgtattacctacttactctgatttgaaagcgggaaatcaggctcttttcgatgctgttgagacattccgtacttctcccagcaatgctaacttcaaggcttgcgccacagcatggcttgctgctcgtacaccgtgggaaaccagtgaggcattcctttttggtccggttgccgacaaaggtcttgaccccaatatggatagctggccactcgatcaggatggtatcgtacagatcctgacttccggtaactattcagacttgaactgggatggtgactatgatgaagaagatgataaaattgccggtgcacaagctttgcgtggttaccacactttggaatatttgatcttcaaagatggcgaagcccgtaccattcagtaagatttttacttgttagaaatcagattttgcggaaacagtgggataatgaatattctgttgtttccgcaacatctgcgttaaaaagataaatgttagttacgtattttgcaataataattcaataacgaatgaatggcttattaaaatactcatttccaatctgtttttcgcttctggcattgtttgcctgcgaggatgatggaattgatgtggataatatagaagtacctgccggctttgccctctctgccggtactgctaccaacttcctgacttcctcttatgcttatgacaggtcggctgactggataacaggggcatacgataaacgtttcacccgtggtgacaaattgtatgatgatatccgcaccagtagtaatggaataggtggaggactgggaccggtttatgccggttattcttgtggtagctgtcaccgaaatgccggacgtacgcaacctactttgtggagcgaaggtggttccggtagctccggcttttcgtctatgttggtttatattagtcgtaagaatggagctttctttcaggattatggacgtgtgcttcatgatcaggctatttatggtgtgaagcccgagggaaaactgaaagtggaatatacctatgagactttccagttccctgatggtgagacgtatgaactctgcaaacccaattattctatttatgaatggtatgcggacagcatcaaacccgaagacctgttctgtacggtgcgtattcctctgcgccacgtaggtatgggacaaatgatggcgctcgatcccactgaaattgaagctttggctgctaaaagcaattatccggaatatggtatcagtggccgttgcaactatatctccgagagaggaatgagaagtttaggcttgtccggtaataaagcacagcatgccgacctgacagtggaacttggtttctccagcgatatgggagttacgaacagccgctatcccgaagaaatctgtgaaggacaggcacaagtaaatcaaggcagtatgatgggactttcttatgcccagttggatgtatctacggaagaaatggagaatgtagatctctacatgcagagccttagtgttccggcacgtcgcaatgtgaataatgaacaagtgatcaagggtgagcagaatttttataaggcgaagtgccatctctgccatgtaaccaccttgcacacaaaaccacgtggttctatactgctgaacggaacccgccttccttggctgggtagtcagacaattcatccatattcggacttcctgcttcatgacatgggctctgaaattatgggcgtaggactgaatgataactatgtaagcggtttggcccgtggcaacgaatggcgtacgactccgctttggggtatcggattgcaggaaactgtgaatggtcatacttacttcttgcatgatgggcgcgcccgcaactatattgaggctatcatgtggcacggtggtgaaggtgaagcatcgaagaatctcttcaaaaagatgagtaaagaagatcgtaatgctttggtcgcatttctgaaatcattataaaacaaataacgaacaataaaaccaataagtattatacaagcaattatgaagaaattaattttaatggttgtaatggctgccctttcgttggctgctatggcacagcatgaagaagatacagaaaacggtgtagtgtcacttgccggaagagagggatttacgatagaaaccaagaagggagactttgtattcaagccctatctgttggtacagacttgtgcaaatttcaattggtatgatgatgaaggcctggataaggcatacaatcaggataatgtagctaattccggtttctcaattccctatgctgtattgggcttcactggtaaagcttttggtaaagtagcctttaatctttctatcaatgcggctgccagtgggggagcattgcttcaacaagcatggttcgatgtgcaacttaaaaaacagtttgccgtgcgtgtcggtaaattcaaaacacctttctcacatgcttatctgacgacgttgggcgaaacattgttgccgcagttgccagtatcattgacttccgccatcattctgccttattccttgaatgcggtaacgcctaacatcggtaccggttttgacctcggtgttgaaattcacggattgttagctgataaatttggctatgaagtaggtttattcaatggtaccggttcttctgtaaatacagctacaaaaactctgagtgatgattggcatattccttctttactgtatgcgggacgctttacttatatgcctaaaggtgtgatgccgtccacccaaggtaatcctaaccgtttgaatgaagataagatcatgttcggtgtatcggcttcaatcaatgtggaaagtgagaatgaaagtaccaatgatacccgtgtgggagtggaatttgccatgttaaagaataaactgtatctgggcgccgaagcatactatatgaatgtgggcttcaccgatcgtcagaaaataaatgagacatacaattacctgggtggttatgtacagggcggctactttgtagctccccgtttgcaggctgccttgcgttatgacttctttaaccgtaacggtaccagcgatgacggatttctgaatatgccggctgtgggtgtgaattatttctttaagggttgtaacctgaaactccaggctatgtaccagtatattgcccgtacggggcacgatacacagctcgaccgagataatgataatttaggtctggccactcattctgcaacagtaatgctgcaatatactttctaaaaaaacaaagagagtagttatgaagaaatgtatattattctttgctgctatctggatgacactctgcttctgttcatgtgatgatggaagaatctatgagaaggagatagaggtgcagcgtggtggccgagtcctaaagttgacaggtcgtttcagtggtatcagcaattggatggatgattatagtgtcgttgtggcaggcttcaatgataaaagtgaatacgctgttataacgaaatcactgccagtcaatgtaaccgacggaacagatatcgttatgacactgggaggtatcagtgatgaagtgaaatcactcaaattgtgtgttatcagtcgtctgcgcgaatgtattgtcgaatttaagacgatggaagatgaagaactcgcagctattacagatactatattaatggatgtgggaacactggacgtgggtatgttcagttccatccagtcacaggttttcgataaaagatgtgtagcgtgccatgggcagaccggttctgcatcgggtaatttatttctgacggagggtaagagctatcatgcgttggtcaaccagccggcgcataagaatagtgatatactattggtgaagcccggcagtgcagaagagagttttctacatctggtcttgaacagggctggtgatacgagtatgaaccataccgatatgctgtcagaagatgagcaacccttattgaaactgatagataattggataaacgaaggtatttttttgaataacgagtaaacgatattggaaatgaacaacaaaaaacaaccaaccaatcaatcagagaatacattaaccgagatttttaaatatgaagtaaaagaaggcgtttcagagtttcatgtaatgattcactctacccggccggaagacacttatgaagaacaattaaatgcagtagccaatgcctacaatgatttgcttgcaggtgaattgaaaggtgccatggctgtgtttaaacgttattttctgagtgataccgccaatcaggctgacctcctgctggctatcactaccgaaagttccgactgtgctctttccgtggtagagcaaccccctttggatgggacgaaaatagctttgtgggcttatttacagaccaatgtgcagacacaagtgctgcacaacggattgtttgaagtaaagcacaatgcgtaccgccacctgtggggaggcagtgttttcaatcgtgccgcaaattctgagtaccagacccgtttgttgctgaatgactacgcgatgcaacttatggaacaaggatgtaaattggcggataactgtatccgtacctggttcttcgtacagaatgtggatgtgaattatgccggtgtggtaaaggcgcgtaatgaggttttcgtcactcagaacctgacggaaaaaacacactatattgccagtacaggtatcggcggacgtcatgctgatcctaaagtattggtgcaaatggatacctatgctgtggcaggcttaaagccggaacagatacacttcctttatgctcctacgcatctgaatcctacttatgagtatggtgtcagctttgaacgcggaacgtatgtcgattacggtgaccggcgtcaagtgtttatttcaggtacggcaagtatcaacaataaaggggaagtagtataccccggcgacatccgtaggcagacggaacggatgtgggaaaatgtagaagccttgctgaaagaggcggagtgcacgtttgatgatttggggcatatgattgtttacttgcgtgacattgcagactatgcagttgtgaagagtatgtatgacaagtgtttcccagatactcctaaagtatttgtacatgcgcctgtatgccgtcccggatggttgatcgaaatggaatgtatgggagttaaggctttgaagaataaggaatatgcacctttttaatctgaagaaaagtctcgtctccttatatatctgtctggtggctttacttgctgtggtgacctttgtggagcatgtacgcggaacagagtttgtagaaaagtatgtttatcatacagtttggttttgttgtttgtggggagtacttgctgcattggcagttgtcgtgttggttaagcggcagttgtggcggcatctcccggcattgttgttgcatggctccttcctttttatcttggtgggagccatgattacattttcatgcagcaagaaaggatatatgcatctcacagtaggcactgaggtgggaactttcatagaccaagacagtaagcgggtgatcgaattaccattcacattgtgtctggacagtttccgggtggagtattatccggggacggaggctccggcagattatgtcagctatatccgggatgcggaaccagtttccatgaatcgtatcctctctcgtcaggggtatcgcttttaccagtcttcttttgatgatgataaggaggggagttggttgtcagtgaattatgatccgtggggaataggggttacgtatgcaggatatattttgctgggtatctccatgttgtggatgcttgtcggtcgcagtggagaattccgtagattactcaggcatccattgcttcggaaagggggaatgtttgtgtggttgctcatggctgtggtaacggtggtgcaagcagaaaacagaagccttccggcacttgcactcaggcaggcggatagtctggcattcaaacaagtgatttatcatgatcgcgtagtaccttttaatactcttgcacgagactttgtattgaaactgaccggaaaaccttcttatggtggtatgacacccgaacaggttgtcggaggttggctacttcgtccggaggtttggcagaatgaaccgatgatttatataaagagtgcggaacttcgtcatttactccggttatcgtcttcttatgcccgtcttactgatttgtttgatggacaaaactatcgattgcaggaattttggaagggtggacaaaagccacatatgaaaatgacttcgttggaaaaggctatcatggaaacggacgaaaaggtaggattgatactgatgctacggagtggaacacttatccatcctttaccggaagatgggagtataaaaccactatctgacgtaaaagtgcaggctgaaatattgtacaatcgtattccattcagcaaactgttgttcatgttcaatctgactgtagggatgctggcatttttctatttactttattgcagcatgcatcgttcggcaggtaaggcatggagcgtttttacagttgcactttatgcagcattcctttttcaactctttggctactgtttgcggtggtatgttggcggacgtattccgttgagcaatggatatgaaaccatgcaatttatggcactgtgtacacttctgcttgcatgcatattccggtgtcgcttctcttttacgttgtcttttggattgctcatttcgggttttgccttgttggtagcttatcttgggcagaacaatcctcagatcactcctctgatgcctgtgttgctgtctccctggttaagtattcatgtttctctgattatggtatcttatgcattgtttgcctttatgatgctaaatggattactggcattctgcataggaggttggcgaaaaaaggcaatcgattcggagattcaggaacagcgtaaggtccgtgtggagcaattgatgcttttcagtcggttgatgctctatccggcagtattttgtctgggggcgggaatttttattggtgctgtgtgggcaaatgtttcatgggggcgttattgggcctgggacccgaaagaagtctgggctttgatctcctttttaatctatggtgcggcattccacggaccatcgcttgccgtcttccggcaaccccggttcttccatgcttatatggtgttggctttccttacggtgctgatgacttacttcggagtaaattatctgctgggcggtatgcatagctatgcctgattatctttctatttttggatgatataataaaaatgcctgcggaattcgcctatgcacccaaagagaacgcccggtacgtgttttccgggtaggggcaggccggctcccccccgtatcagcgtgaccgtgccggaagaggtgagccaacaggaggacctgctggtagcccggtcatctgagctcgggggaaacagtaacacggctgttgcactgaccttcaaccatgcactgaccgccgtcagattcgtgtgcgggaatgatatgcgggaaggtacggtcaagcaggtccgtttgaaaaacgtttattccagaggaacttacaatatggggacacaaacctggagcggtttggatactcccgcctccttctcacaggcattggataaagtgacgacaggaacagctgacgaggcgctcacgagtgaggcgcagacctttatgatgctgccccagcggtttcctgagggcgcgcagatagaagtcttattcacagacgacacccatacaggccacactttaatagccgatataaaaggaagtgagtggccgatgggcaagactgtgacctacaaaatatccagtagttctctcaactggacttacacgcttgatgtcactgccctggccgattttacatataccggtggtacacagcaatattgtgttaccagttacaggcaaaacgcccaaggggaaaaagaagctgccgaatggaccgcacaatatgcagaagacggaaccacgtggacagacaccaagccggtatggcttaccgcattcacggcatctggtaccggcggtgaatttgcgcaaccttgtgatgcgacggtcgaggcgcagaccggaatatcaaatgatttacatgagaatgctttgaaggcggccacagccaagggatcggaaaccacaccgtataacctttccaacaacaccggggggaatactgttgagaacactgccaactgttacgtggtcaacgctcccggttactattctttgccgctggtatatggcaatgcgatcaagaactcagccacgaacgcttccgcgtatacctccacggtgacaggaaccaatatcctgaatcctttcatcaaccatgccgggaacgggatcacggatccatacatcagcggtaatggatgtacgccggccaaggccgaactggtctggcaggatgcgatgaacctggttacggatataaaatacaatgccgattccaatggcggcaatatctctttcaaagtggaccgttcttccatccggcaaggcaatgccgtcattgcgatcaaggatgtgagtgatgccatcctctggtcctggcatgtctgggttacagacgaagacattaacaatgtgattgagataaccaatcatcaaaacgtaaaatataattttatgcccgttaatctgggacaatgcgacggtaataccatcacctatgaagaacggagttgcaaggtaaaattcattgccggggaccagagtaaggaaataaccatcaagcagttggcgaacgtaatcgctaccggaagtaatgctcctttttatcaatggggacgtaaagatccgctctacccttcgaacggaatgggtaacacaaccaaaatctggtatgacaaggagggaattccatctacagcaaatcctatgaaaggaaccttttcggccgggaatgattgtatcaagaactgtattctcaatcctaatctgatgcacaatagatataatggagattatacctattacaacctgtggagtgccgataataaaacaacttctgccaatgacaatcctgttaacaagactatttacgatccgtgttccgttggttttaaacttcctgccagtaacgctttcacaggatttaccacaacaggagaaagtgtatcatcttccactcaagttaacggtacctggagtagttcggaaaaaggttggtatttttatacaaattccgaaaaaacacagagcattttcttcccggcgttagggtatcgtagttattccactatgcggccaggtagtatcgggacacagggttgcttctggtcggcacatccggtagcgaagggcaataattattaccttagaactagctcagtagacgtacagccaacatatatggtcgatcggggattcgggtatgcgctccgtccttgccaagactaaagggttgcaataaaaacaaggagctgcttactaacacagttgcagctcgagaaagaacacggcacagagggaaaaaaggtaagtcaaattagccgaagcggagaacatgattcattgcttcggctttttctcatctatgtttggaactcatcagcgtctttccttagctcccgagctgtttattgagcagctttacacgctttcagcgtttctttctacttccttctgtcgtactcagaatcgatcacagaatcggttcggttccggatgaatccgttatctctctactagttgcatttgatttccagcatatcaaaggctctcctctacttccccccacatcaacaaataacggtatttcacattattatcctgcactcgttgcatccactgcggttttcccactttttatcactaactttatagataaaatccctccgaagagaattgccaatgacacgatcaggaaatactcggaatgggaaatatatgggagaggataaaaggagatatcatactataacgaatatattacaatataatctgatccctgatttttttactatatttgcaaagtattgtataacatttaaaaatatgaccatggaaaaaacatttgcacaaatcagtgaattgtttgatcaattttcaaaagatgccagcctccaggtagaaaaaggaaacaaagctgccggaacccgtgcccgcaaagcatcactcgaacttgaaaaactcctcaaacgtttcagaaaagagtcactcgaagcctcgaagtaatttttactctggtctcgacggtatggaaatggcggcatagcgtgtaccatatcgaaaaaaaacttttcgtttcacagcggggaggctttattagttgtgataaaattaaatatcaattatgtgaaatttctatttcgcttctgaaaaaacaactctactttcgtatatctgttggattccgcaggtgtatagtcggcaatttctccttaactaattctgataatacgttcggccgatattccatgtcattccagttctgtagcaaccaagcaagctcttgatatattcaaagaatcgttgatacctgatgtaccagtagaactgtcggcagcaccagttactctcacggataaactgtattttttcgttacacgggccagttcgttaaaattaagcctttgtgaggtatcctttaggacaccgtattggaagcaaaaaagaaatagataggtgtaccaatacattccccatcagcgtatgaaaaaaacattggaatccatagaaagggtgtcctgaaagccaaactgcatatttcgggaaatcgtataattacatgatggctttccactttcagattgaaaggttgtcgtgtcaagaagtgatgaaccgctccaatagctatgcttcagccctccacgaagtgagttcaaaccgctgtaagcgttattggatatgtacatctagttatattatatttataaaaatatcaaaaacaataagttacaatataccataagaagctatttttatttatccgaacacaaagttatgctttaaaaataaaatgtcaaggctgaaatgaattatgattttttaaatatgctaaattgcttctgttttaatactgttgtcttttcacttataaacataccaactccggaggcaaaggctgggatggtttgtcggcatattcgccgttaaaccgtcctgttttcgtttaacgaaaacacaacttgctgtcccctaatggggacaacgttttgaatatcacgctatatccatatagtgctataaagccttttgtcaggggaaaaatgcatacggtttctgccattttttccgcatttccggttttttgaatgtaaatgtttccccacagaacatgcgtcttcccactatactgctataactatatagccatataaaagaatcagaaattaaaatatcattgattgacagcataattcaccgatttacgggaatgtcttctgtagtctttagtccgctataccactatcagtatagctttagttatctctatttcgaggtcatcctctatgcagctcaccatatcatgttatatcactatcagcatatccccgtttatccttattccgatgtcacgccctataccgcacggcattcgtttggaaccctgatgctgtcctccggcatcccgatagagagcatcgccaagatgatgggccatacgaacatcaacagtacgcaggtctatgcataggttaccgaccagaagatatccggtgacatggaccggctgatgaaaagaagacagaaagggagtacggtccccctaacggaaatatccgaataatgaaatgccagccgaaaccgatgtttaatggttccggccggcattcttgagtattgaacgtccgattatatcagggcctcatgataattatcttccaggagtttctcaatgtcggataccttatacaaaatttttccacctagccggatataagaaatacgcccctggtccctataatcctgcaggcatctgcggctgatttttaacaggtccgacaattccttgtcagagagaaaacgctcaccgttaaacagggggcggttatcctccgcaagcctttccagcttcgtctgaatgttatccagcaggccaaagaatcggcggacactgcacgtctctttgctaataattccttccatgttgcatccaattaattattcattctttcttttttctctcaccgccttttccttgcgtttcatggcggcatagaccatcagcttttccacgtcctccggcctgtagtagattttccgttggatttgggtgaatgccagccgtccggtatcccggagagtctgcagggtacgtggagagatgtcaaggcgcaggcagacatcctggttatccattcactctcccggtttcttttccctgtttttttcatacaagcggtccacctgtgcggacaggctatcagccctagccagcatttcctcaaagattccggcttcaatgtaatatacttccatttttcttgtttttatttaaaatagcttccttttagaaactcaaattattgaaatacagttcaaaatactttccaaatgcacttccggatgggagtcgtgatttccgactccccctccagagctgttttaaggaggacttcccgtcatattacggctgtaacagtttgtaatctcgtcctgtgatcttctttatcatgccggcgttttctttgatatgttcaaccagtatgcggcttataacaccggaaacagtaaaatccttacgtctgactgcccagacaatgtctgagatacattcgtacacctgtgcatcaatatgcaggggcttgcgccggttggatgaaaaattgttcaggagggcttcaatgtatttttttacctcttcatccgttatcgtctttttactttccgcccgggatgaagactccttgtggggcggcacctcttccagattctcggaaatactgctcaaatatgagcctttagcggcaactatatccagtatctccttctcgttgatattatacggttttgtttttttcctttcaatgctgtccataactatgatttatacattaattccatgtgacaattgggcgttttgtaaggcggatgttcctgatggcggattatcgtcctactctgcaaagaaaaaaagaataaacgtgggaaaggataccttgtcagttatagtcatatatagacatgaatagtcaatgccagcaaaagacataacaaatggcagtccggcgggaggccaggattctccccgatgttgctaggattgtgacatgtcaagccatggagatattgacagcttacattcttgggataatggtacaccaggctacggatattgtaacagcttatgttattggaatagtgatatgtcaagctatgaagatagcgggaactcatgttggcaagatagcgatatacgaggagacagcaggacgggaacactacggcgatgaaaagaaaaatccctgttggtccatgtgagaccggcagggagcgtaacaataaaaggaacgggcttctcagcccctgatgtaaccgtactttttcaggtcgtccatgaactgctccggggtgtcggttctcaccgtcaccccgtgcagttccctgtaccgtccggagaaattcactatgtactcctcgtcggtgcatccgctgtcaaaccagctgccttcacgcaggatgcgtacaaactcggaagggccggaggcggcaatcctgccgccatccgctaaaatatatatgcctgttcatgtcgatatttttttagtccttaaatttataatatagtttctgttcactgtcgaggaaggggatgttctggagcgcggtggccacaggcacctgtcccctcgtggcaaaggtaactaatttgtggagaaacagtacccagttgcgcatttttgtgaagcaggtcgttccggaatgctggcggaactcgatcgtcttgtgccgtgagtaggcctcgaggtccaccttatggtaacggtcaccgatccttcctttcagctcgtccaccatccgggcggaacgtatcatcccgtcagagacatgacccaggccacggcaatagtagttgtccctgcgggatgccggtatgaacctgtcgatgaccggttccaggtgcttgtagctcagggacaggttacgccaggtttccatgctgaaaccggcggcatcgatatgtacatgaagcccgcagctcccgttcaccttcacgtcacacaggtcaagcacccagcagcccttctccagttcctgtaacccggcttcaccgaccaggatcggactgaccagttcaaaggtgtcgttgccgttcagactgccgtccgtcacgagtttccaatgcggacgggtggtatggttataactttccaccataacctcgataccggcctccctgagctcgcgtgcgagccgttcacgggagcagttgtaagcctcgatctcgataccgaacttgcgggtgaaagtataatccagtgcagctgtcgccggatggatattcagaccgccctcacgttcattcatccggcgcagggcgttcacgacaaaaccgtaattaccgttggtcaccatccttgcgatttccgcacggggaatccctaaaagatacagttgccggatcttgctcgtttttgttgtctcttgtgctaaaatgcttctaacttgcttgttcataacttgttagcttctttatttactctactaagataatgcttttataggagaaactataatcataagaactttattatcactgcattagcttactttgttttagactaaaagtccttattggggggatccttatcttatccgctgcaagtcccggatgacaaaaggcggcaatatatcggaatagtcagataacgatatatcatgatatggctgaccgcataagatgtgacatcgaaataggaatagacggggatatgttgatagcggtataacgggttagccggatagcgatatatcatgatatggcgaaccacatagggggtgacatcgaaatagagataactaaagctatgccgatagtggtatagcggactaaagactacagaagagattctcgaaaatcaatgaattatgctgtcaatcaatgatatttcaatttccgattcttttttatatggctatatggttatagcagtatagcgggaagacgcacgttctgtggggaaatattccccttcagaagatcggaaatgcagaaaaaccggcggaaaccgtatgcgtttttcccctgaaaaaaggctttatagcactatatggatatagcgtaatattcaaatcgttgtccccattaggggacagcaagttgtgttttcgtttaacgaaaaccgaatggtttaacagcatatttcgctgccaaaccattattcagttcatgctcctaagtcgcacagaatcataaaaccgatatctgtctttggactatttatccctacaaattgcgctattagattctcataccacacgaaaaaaaagacatccagagacttttacaatgtatgggatgtatacaatcggccaatgttcagtatatcgcagcagacactcaatccatactttaataccatcattcaatgctaacacatcacctctatttttcgatcagtccattcaagtattataacatagattatagtaatggactgtaagaccattgctgaagacaagaacaagattttttatacctatttcaatactctggacatcatccttgctaatgttttgaacagattctcctccatacataatctcaacggaaataaattctatattacgatactgcttgtaccatctctcgaatagaaaataaactacacctttcatctggcaaaacagaacgattgacatcaaatgggaaacagttttccaaccactcatgagaaggaggataacgaaataaaccaaacactctacatctattggctgggataaatagctaaaaagaaaatttgcgaatcaaatatcattttatatttttgtttctcaaaatttttaatgaactaaaaagaattaaaatgcctgcaaaactcactcgtccagagaattcttttaataatatttatatgcgatattacaaaaagtcttttctatttgtaaagtcgtatatacacaatgagatggtagccgaggatattgcatctgaatcactcatcaaactgtggcaatggatacaggacaacccggtggaaaatattgaaccgatgttgctcagtattttgcgaaataaagccttagactacttacgtcatgaaagcatgaaacaacaggtcatcacacggattagtgagaaacaaaatgaagagttagctcttcgcctctcctcactggaagactgtaatccaaatgaaatattctcgaaagaagttatggatattgtgcaaagaacattgcaatcattacctgaacaaacctcccgtatatttactctcagccgatttggaaataaaacaaatcgggaaattgcctgcgaattaaatatttcaatcaaagatgtggaatatcatatatccaaatcacttaaggctcttagaaaaacgctaaaagattacctgcctttattttatttctttttttaccatatgtaacaccgattactacgcacgttcctttatcttttgaaaaaaatattctttttcgtttagggtaaaccgaagatgaatcgttatataaatgaaaacgataaaaagatggatgaactattacaaaaatatatagcaggaaatgcctctgaaaaagagtcacagaggataatggagtggctgcgcgaagatgaacagcatcttagagaatataagcggcaacgtaaattgtatgacattacgttatggcagactaaaagtcccgttgatatacaacaagagaagaaagatccgctgaggagggttctcgatgttattgtacggatagcggctgtcattgtttttactgtggcaaccacttatttttacactcaccacgttttacaagacaaggaggagaatatgcaaacggtagttgttccggcaggccagcatgccgaattatacctggctgatggaacgcatgtatggctgaattccggtagccggttgacttttccgggacggttttctaaaaaggtacgtcatgtagaattagatggtgaaggatattttaaagtcagttctaatataaaacaaccttttattgttggaactaaccgatgcaatatccgggtgctggggacagaattcaatgtgctggcctatgagaaagatagtatatgggaaacagccttattggaaggtgctgtagaaattctgcaaaagaaaagtgaagtatctctcatgaaactgaaaccaggtgacatggccagactaagtaaaaaccaacttactaaagaaaagatacatacaacagactattttcgttggaaagaagggcttatttgtttcaacgatatctccctacgcgatataatggagaaattaaaactctattatgatgtgaattttgtcattaacaatcaacagattcttgatgcgcactataccggaaaattccggacccatgatgggattgaacatgtaatacgtgtgcttgccctcaataataaatttacctatattaaagataacgagagcaatacgataaccattaattaactttttaatatttctaatgcctatgaaacaataaagaaacatttaaaaaagaaaaggggacagtgctgcaacaccatcccacattttccatcagtttataccaactgacaaaatagttctagatcaagttaaacctaataaactaatatgttgcgaaaatatgaaaaattctctataccaggaattatttatagaaaataaacagttattccgtattatgaaaattattgtttacgtctgtttcttatgtgtaggaaatcttctagctataggaagctatgcgcagacagctcatgttacgattgtttccaaccatataacaatcggacaagtgattaatgaaatagagaaacaaacggactatctgtttgtattcaacgtaaaagatatcaatatcaaacgtaatgtcaaagtgaatgcgaaagataaagccgttaatgaagttttgaatgatatattcaaggatacaggcattcgccatgctatagaaggtaaaaacatcatgctcattaactctacggataaggaaaagggtgcgcagcaaaaagattttttagttacggggatagtaaaagatgaaaatggtgagcctattatcggagcaaatattcaagtcgtaggaaaatcggcaggcacaattacggatatgaacggacgtttcagtatcagtgcctctgccaattctacattgcaaataacctatattggctaccaaacgcagactgtcaatatcggcgagcagaggaatattaacattattctacaggaagacaatgcgcaattggatgaggtagtcgtagtggggtatggtacgatgaagaagaaagatctcaccggttcggtaacagctgttaaaggagacgaacttgctgcccgtcgtaccacccaactttccacagctttgcaaggcgcgctttccggagtaatggtcagtcgtgacaatggagctcccggtagtagtgcttctatccagatacgtggtgtaacaactattggtgattccagtccgttggtgattattgacggaattccgggtgatatcaactccgtaaatcctgaagacgtagaaagtatgtccgtattgaaggatgctgcttcggcttcgatctacggttcacgtgccgcagccggtgtaattgtcatcacgaccaaacgtgccaagagcggtgatgtggctttgagttacaactttgagtacgggtgggaaataccgactaagttgccgacctatgtaggagcccagcgttacatggaaatggtaaatgaaacacgctataacgataatccagacggtggatggtaccaaacatatacggaagatgaaattaccaactggagcataaataatgcgactaatccggacaaatatcctatgacggattggggagatattctgttgaaaagctccgcaccccggcagacacatactctaagcattgttggtgggggtaagattattcgtacaaaagcctctttccgctatgacaaaacggacggcctctatgtaaacaaggaatatgaccgttttatggtacgcgtgaataatgatttcaatataaataaatatatttccgcaaatctggatttgaacttttcccgttctaaagctctctcgcctaattccaaccccatgggggcaggtggacgaaacattccgccaatttatgctgctacatggaccaatggcttatggggtgatgtgaaagatggagaaaatatgctggccaaaattacagatggcggcacttttaccaactggggaaccaatattggcggtaaactcggtattgacataactcctgtcaatgggctgaaaatatcagcagccgtggcgcccaatttcaataatgtaaagaagaaaacttttgtcaaacagattccatacacccgttcagaagatccgaataccactgttggttacatgggaggttatcgcactaccaatttgacggaaaatcgtaatgacagccatgatataacaacacagttctttgccaactatgccaagacactggggcgccatgatttctctgtcatgatcggttacgaggattattatgctttctgggaaaacctggatgcatccagagaccagtaccagttgacaagctatccttacctggacctcggttcggaggattatcgggataatggtggcaatgcggaagaatatgcttaccgctcattattcggacgcatgacctatagctatgcagatcgctatcttatccaagcaaatctccgccgggatggttcttcacgttttgcatccaattgtcgttgggccaattttccttccgtgtcacttggttgggtaatttctgaagagaagtttttcaagaatataaatatggattggttttcttacctgaaattgagaggctcttggggaaaactgggaaacgaacgtatcggggcttatgacgatgacggtaactttatttataattattacccttaccaggctgcaattgattacagcactgcactatttcagaattcacaggggattgtttcttccgtgactacggccgcacagcagaagtatgccgtacgagatatttcatgggaaacaacagaaagctgggatatcggtttagatgctaattttctggataaccgtctgcacttctccgctgactattatagaaaaaatacgaaggacatgttgctggcactggaaattccacacttcatcggctacgacaacccggaagtcaatgccggaaacatgcacactaccggctatgatattgaagttggctggagggacaaagtcggtgatttcacttactccatttccgctaatctgtcagattttacctccaaaatgggaaacctgaatggtacacagttcctaggcaatcaggtaaaaatggaaggaagtgaatataacgaatggtatggttacgtaagcgatggcttgttcctgactcaggaagacgtggacaagtcgcccaaactgaacaacagcgtcaaagtgggtgatattaagtacaaggatatttccggaccggacggtgtccccgacggagttatctcacctgagtatgaccgtgtacttttgggcggttccctgcctcactatatgtttggactcactttcaatgctgcctataaaggctgggactttggattgacactacaaggtgttggaagtcagaaatctcaaatcagtgctgcaatgattgaagggcttcgagacaactggctcaatttccctactattcttgacggcaattattggagtccgaaaaatacggatgagcagaatgcgacagccaaatatccgcgcctgactcgcaccaatcgggatgctaatttctgtatgtctgattattggctttacaacggtcggtacattcgtttaaaaaatctctctgtcggttatacgctccccaaagcatggactacgaaggcgtgtatgaatacagtccgtctttatgtaagcggaagtgacctgtttaccatcagtaatgcccccaaaggatgggatccggaagtaagtacagaagggtatcctattaccacctctctaatatttggtgtttctattaatttctagccataaaaaacatgaaaaagttactcttatatatcggggcaggaatactcttactctctgcctgccatgatctcaatttaaatccattgtcaagcggttctactgaaaactggtattccacggaaactgaagtgcagatggccgttgatgagttatatcgatatgacttctggccggaagacggacaacaacagaccgactggtcggacgactatacttcacgcgatctcctgacctcttttgatgacggaactctaaatggacaaaatgcttgggttaccagtttatggggcaatcagtacaaagctatttcacgtgccaatgcagttattgagaaatcgcatcgtgctatcgaaaatggcgcatctgccactactattaaccgcctgattgccgaagccaaattccatagagctgccgcttatgccaaactgattgtaaagttcggtgacttaccattggtattaaccgatgtaagtacagaagaagggttgacaatgggacgtacggataaatccatcgtattggcacaaatctataaagattttgatgatgcaattagtgtgcttccaacttcctatactgaccaacagcgagccacccaaggtgctgcactggcactaaaagcccgggttgccttgattatggaagattgggaaacagcggccgatgcagccaaggcggttatggacttgaatatttatgaattgcatcccgattttggcaatctttttttgtctactacaaaaaactcgaatgaatttattttcaaaattccacgtgatgctacatatgacatttatctgggaacaggaaacggaggagttaaccaggtatacaatgatctaccccgtaacgtaggaggatggacgcagacctgtccgtcatgggagttactagctgcattcacctgtaccgacggtctgcttattaacgaatcaccactcttcgatccgcatgaaccatttgcaaatcgtgacccacgtttagcagaaaccattgtaccatttggttccaaccacctcggttatgaatacaacccacacccggaggcactgacgtgtatgaactataatacgggtgaaatcgtgacaaattatgatacacgtgccaatgcccaatatgcttctttcgatggtctggtgtggaaaaaagggatagacgaaacatggcttcagaatggtttcaaggtagaccaggatattatctattgtcgttatgccgaaatattgttgacatatgccgaggcgaaaatcgaattaaatgagatagataactccgtattggatgcactgaatgaggttcgggcgcgtgcttatggtgtggacaagtccgataaggcaagttatccggctttcacttctaacgaccagtccacacttcgccaccagctacgtgtagaacgtcgtatggaaatggcaaaggaacacatgcgatatacggatatcatccgttggaaactggccgaaaaggttatgaatcgcaagacatatggtatcctttatccggcctcactatgtattgaacgggtaaccagtcagggagattggttttgggctttcacaccggaaatggacgaggatggttgtgcagatttctccaaattggaagaagcgggtaaatgtcaggcacttgctgtacgtagttggaacgatcgccaatatttgtggcctatccctactacggaacttcagatcaacgagaacttaaaacaaaatcccggctattaaatgcaggaaagttgttgatagtccgggaaaaggtaactccttaattattcacccttttatttttctaactttatgattggaaagagctatatttttcacctttttctatttcttctcatattaccagacagtatttattctcaagataatatttgtctgatcccgcaagttgaaagcatggtccggaaaaaaggtacgctatccatcgaacgtctggaaagcatccatttcccggacgaatggaaaaatacaggaaacctccttgtcagcgatctgaaagaactggcaaatttgtctgtcatggtgaatgcctcaaatccttccattcatgtaaaaaaggtgaaaatgcaggagccggaaatgtacatgctggaaattacaaagcaggggatcatcatagaagcaggtgaccagacaggtatgattcatgctttttccactcttttacaattgattctgggaagtgagggaaaagagttaccccggctcataatccacgacaaaccccgttttagttacaggggagtcatgatagattgtagccgccatttctggactatcgaacaacttaaaaagtataccaaacaattggccttttttaaacttaacactttacatctgcacttgacagacaatcaaggctggcgtctgtatctggaccaatatccggatttagcgttcaaaggtacgtactaccggacattcgaggatctatcgggacattattatcgtaaaagcgagttgcaggaattgatcaactatgccgccatgtacggcatagagatcattccggagattgaccttccgggacactgtctggccttgcttgcagcccttccccaactgtcatgtaaaggcggaaaatttgaagcctatccagaggaactggacggacaaaaacggaagagagcagatgagaatatgctgtgtataggaaatcctgaaacctataggtttgtggaaaaactggtagcagaactcactgatctcttcccttcatcattcatacatctgggaggagatgaagtgtcgacacatctatgggaacaatgtccgaaatgccaaaagatttacaaacaagagaatatgacttcatggcacgagttacaggactattttacgaaacgagttagtgaaattgtacgttccaagggaaaaaggatgataggttgggatgaaataaatgaccgtaatgccgctgacatcagtgacgtgatcatgatctggcaacgtgatggaagagaacagcaacagaaagctttgaaaagagggttgtcagtcattatgtctcctaaggatccctgttactttgatttcgggtattcacggaattccacacgcagattgtatgaatgggaaccagttggcaaagaatgtacgaatactcaagcacatctcgtcaagggaggacaggctaatttgtggactgaattcattacaacctcggatgaggtggaaaggatgttatatcccagaacttgtgccttggccgaaaccctctggaacacgaaagaaaagaaagaatgggaagggttccgacaacgtatcagcaagttcggtgctattatggaaaaactgaatatctgttacttcaaagacgaggattgggataacacaggttttgttccgcaaagcgaacaaaggccccgtcttgtatgtcctgcccgtatcgataccaatatgaagggaatcaagtattatatgcctgaatatgcgtttgacggtgatatacagactttctttgcaaccccctattccttaaaaaaaggagattattttactcttactttggaaaaaagacaagcagtacaggaaatcagaattgtgtttgatgtttcaaaggaacatccggaacatgtacaattatctgtcagcgaggacggtacaatatttaagaaagtagctgcagataacaaaaatggagaattgtcagcatctttcagtacactagccatgattaaagccctcaaaatggaattgacaactccactgatggcccggctgactatcaaggagattatccttcgctactatgaataaacaagtataagaataatgaaaattgttatgataaaaaaaattatatatatttctctcatctggatggtatttcacggagcgagtcttcatgctgccagtttattggtagaagcagaaagtttcacggaaaaaggaggctgggtagtggaccaacaatttatggacttgatgggatcaccttatttactggcacacggtctaggtagtcctgttgaaaatgcgagtaccaatgtacaacttccagaaaatggcacatattatatttttgtacgcacctacaactggacgtctccatggcaggagggtgaagggcccggattgttcggtttgtcagtaaacggaaagaaaatctcttaccggttgggtattataggcaatcagtggatatggcagtatgccgggcaatatcaggcaacagaaaagaatattcacattgttttgcatgacttgaaaggttttgacgggcggtgtgatgctatttattttacgacacggaaagatgatattccgccatcggatatggcggctttaaataactttcgtcgtgctaaacttggattattagcccccccaaaaacagaatcatatgatttagtagttataggtgcaggtattgcaggtatgagtacagcagtatctgccgcccgcctgggctgtaaagtcgcacttatcaatgatcgccctgtagtcggtggaaacaatagttccgagattcgtgttcatttgggaggagctatcgagatcggaaaatatcctgaactgggggggctgcaaaaagagttcggtcccgtcaaggagggtaatgcacaaccggcaggcaattatgaagatcataaaaaaatggaatggctgcaagctgaaactaatgtttccctgtttcttaattatcgggcattttcggtgaagaaggaagaggaccggatcatctcgataaccgcttgtcatattgaatccggtgaagaaatcgaattttatggtcgtttatttgctgactgtactggtgatggcactatcggttatctggccggggcagactatcgtatgggccgtgaaagccgttctgaatacggtgagactatagctcccgaaatagctgatagcttagtaatgggcacttctgttcaatggtattctgtggaagacacaaaaacatcctattttccggaattccggtacggcatcgaattcaatgaggagacctgtgaacctgtcacttatggtgaatggacttgggaaaccggaatgaataaaaatcagattaatgattctgaacaaatacgtgactatggaatgttagttatatattctaattggagctacttgaaaaatcaatcggaacgaagaaaatattataaaaaacgttcattggaatgggtagcctacattgccggaaagcgggaatcccggaggctattgggcgactatgtactgaaagaggatgatttaacaaagcacgtagcccatgaggacgcatctttcactactacctggagtattgatctgcaccggcccgaccccgagaatacccggtatttcccgggacgggaattcaaagcgacgacagaccatgtagtaatttatccctatcctgttccctaccgatgtctttattcccgtaatatagacaatctgttcatggcaggacgcaatatcagtgtcacacatgttgccttgggaaccgtacgagttatgcgcactacaggtatgatgggggaagttgtaggcatggcagcctcactatgcaaaaaatatcaagccactccccgtgacatataccattattatttggaggaattaaaatcactcatgcaaaagggagtgaataaaaagggattaccgaataatcaacgatataatgaaggaggcaggctaaaccagataccgaaggtaaagtaaggatacatctctgtctgccagatttccacatacgaaagtttaacaatttattagattaggcattatgataagaaaaatcatattcttagaaatgttattattgggaatagctacattcctgtattcgcaagatgaaatttccaaaataacaataactcatggaccttacttgcaaaacgtgggatctaacgaagctaccattgtatggataacggataagccctctataggatgggtggaactggcctcagatggcaacggcagtttttacgccaaagagcatccgcgttattttgacacgtctaatggcatcaagaatacatcaaccatccatgccgttaaagtcaagggactgacaccgggaaaacaatatcgttaccgtgtttttgctcaggaagtgttgaaacatactgggtataaaatcatttatggaagttatgcttccactgatgtctattatcgtaaaccgcttacttttcatacctgcaatccgcaagcgcctgccacctcttttgtaatggtcaacgatatacatggggacaacaaactgctggaggacttaatgtcccgttgtaaccttacgcaaaccgactttgttctttttaatggtgatatgctctctttcataaatagtgaagatcagcttttcaaggggtttatggatacggctgtacgacttttcgcttctgagatcccgatgtactacgcccgtggcaaccacgaaacacggggagtatttgcaaccgaaatccaacgttatttttctccctgtcaggaacatctttattatgcctttcgacaaggtcctgtctattgtattgttctggatacgggagaagataagcctgattctgatattgaatatgccggtattacccaatatgacctctaccgtaccgaacagtccgaatggttggccagtattttggaaagtaccgaatataaagaagcgccttttaaaataattgtagctcacattcctcccgcagttactgaagctggtcccgatgaggattggcatggaaatgtagaagtagagcagaagtttatgcctttattacgccaggcttatccggatttaatgctttgtggacacttacatcgttttgtgcgtcatgatgccactgacaaaacgtctttccccgtagtagttaattccaatacatctttgctacgtatttatgccacgaccacacagatgaagatagaggtaatggatcgagacggaaaaatgctggatgaatttatcataaaaaaataaaaagctttgcattagtacttggcaagtaattattcgggtgacaattacttcttaatcaatgaagctggtttctgcagattctgcatgtatgagaggctgatgaatttaggaataaccaacatttacggggtaatccagtcgatgtgcctaccatgagcaaggagaagttacgcaagaccaatgctgtgaattgtagcaaattggcccacgagttacctttcggttcatttgaaaaggaattatattctggggaggaaaccacaaaaatacgctctttataagactaagaaacctgattgcaaaagacagcatacataccaagaaccgtatcaagtctttgctcgtttttatggtgtggaaatatcgagaatgtttgcccgatgtaccattagctagggatattcctaaaataggaaaatttaaggcaactaattcattgcgagttagttgccttttggagtttgcccgacatgggcataatctaatgggtgtaagtccccatcgcagccttatatcggcaagcgtacagccgacggcaatggtgtccgtagtgattcggcatctaaaggaagtcttaggcaaagcactgacctgacgtacagaaacttgatactaaggcatatgagtgtgggtaagtctgccaaacaagataaagccctatagctatatggaacactcggtgtaaatcaagcaggtataagtgtgaaagattatattcttaatcggggaggtctcacggacgtgtggagcatgtgtttagattgccaaacacggagtaaagcttattgtgagaagtcagcagaagccatagtacttaagttctttttaaggaagggctgaatcgcaatagctataaacacgtaactaactctaaataggaaagaatgcataaaataagagtcatagaaagtacacttggctaccctcaaaagaataggatggaatccgaaagctatgagggagtgcagacctatatggacatgaaagacggcagtttgatagcagtgcaaccaaataaagatgacttaatgagtcaaattctttctcccgacaatctcaatcgtgcctatctacaagtggtacgaaacaaaggggttggaggtgttgatagaatggattttaagcaactgcttccctatcttcatgaacacaaatcagaacttatcgagtcgatacgcattggaaggtacaaaccgaattcagtgcgtagggtagatatagccaaggataacgggaagaaacggcttataggcatcccaaccgttgttgaccgcttgatacaacaagccatcgtccaagtgctatcgcctatctacgaacgccagttcagcccaagcagttttgggtttcgccccgacgtagtgcgcatgtagcattgctccaagtgtgctgttatacaagcgaaggctacaaatatgctgtaggcatagaccttgttagattctttgatacggtaaaccatagtttcttactgagaatactgtcaaggacaataaatgacgggcgtgtcatttctcttatacacaagtatcttacaagcggagtaatgataggtaagcattatgaaccaagtatagagggtacaccacaaggcgcccctttgagccccttgctcagcaatatcctgctgaacgaactagacaaggaattggagagacgttgacactgctttgtacgctatgcagatgatagcatgatactgtgcaaaagtaagaggtccgccgaacgcgtatgctcaagcataacggacttttccttctatttcacgaaaggcaaatgcaggctgtatgttcacaagacaacaaaagagaaattcaaacgtaaggttaaatctcttaccagacgtagtaacagcatgggttatgcccaacgtaaagagatactctggcaaacctttagaggttggatagggtatttcaaatatgcagacatgaggagtctgctgattccattagaccaatggtatcgcagacacttgcgtatgtgtatatggaaatgttggaagagagtgaagactcgcttttcaaatttgcagaaatgtggaataccgaaaggtaaggcttgggagtgggcaaatactcggaaagggtattggcgttgtacgcgtgcctttcttcagaatgctattgaggacgaggctcttcggaaagcggggtatccaatgttatctcatctttataagcaaatacatatagattgcgaaaccgccgtatgcggaaccgcttgtacggtagggtgagattgtgccacgagaagcatgtgctaaatgcttcgcaactatgtaggagatgagggtaggtccctcgcaatcaacttgcaggaatctcctcagtactgaatgctttgataagattgctgtcgaccaattctttaagtggacatcaattcctacatctaatgtgttactttgtacacgtctcataagctatatcgttttagttaatgagttatgacttcaatataatatgaagtttactaaaatggtatagcttttttagtgctatctactgttatccgtcacttcagattttaaacatagaaacttatttttttataatcataccgtccaatttattattaattttccagcaaggataccttcgtcagccactatacgtttcattggaagatcccgtaatccatttataaaatcaatagctgattttaatggaggttgattctttatagtatcacttgaaatataaaacttagttctagaactaaaaagtaagtaaacaaaaaggcggagaatagcagtctccacctttttatttattctttggccttttgtattatagtaattccctgcttgtataactgttgtaaatctcctttccaagcctgttaaatttgaatcaatcctgataaagattgatttgcgacctgttttctccacataaagtccaccaccttctattacttgaacattaagggagtgtgttctatatatcgtgtctttagtagagatttcagtcagccaccagtcgtcacctttcctggttcgtaactctatagaatctttactggatttaaaaaatacctctttagtctctagtcctatcgtatctgttcccttgccaacgacgtcatcgctacatgaaatgaatacaaataaaagtaacacgaaagacagaaaataataagtttgtctcatatttcttattttattatgttaatatatggaattatttctacattatatggataattacccttgccggctgctctagtagaaggaaaagtaggtccttcacctccattaaaaatacccgccaaataataaccattactattaccattccagccccagtttagatgcaggtaatcttctttctccgtatacgaatgatgaactttatcgcttccttttctatagacatcaacatttctctctctatgaaaatagccatcagaaacccaagcatgaccattttggtaatatttaatacccagtattttctttcttaccgaattgccacatattataaccggacatttagctttaatagatgttataacatcccattgactataaatttgaggattattgggtttcctatatcccattttctcgaagcattgtggtatattttttcttttagctccgcttgtatctgttccccaatccattttaaccaaatcacctatagagcggaataaatgggcaactgctggagtggtggggaattgtttcatttcagaccaattatatgacaccccattataccctgaaggtttttcatgatatgccattacttgagctattgcagtagctacacagcctgtgagggctctttgtccttctataagaggtgccgcattgttatatggactcctttgtccccatttaacagaaatcaaaggttgtactctttccgtttcttcccattctccaggtttctttatataaataggacgtcttctaccccttgtttgagatgtgtctaaagagttatcgtcatcattttcttctttgaactctatctcatactttttattattagaaatgtaattttgaactaaatcaaaaaagaaagataattcctgatattgaagcgtgtcacttaaagaaagattgccagactctgaataagcaataataggagttgtatataggttggccgatactattgcatagccattgccaccctctgcattggctatataaaatgagggatatgtctgattagtaattgtatctctatagaaatagatttcattgtttattgaataattaagaaaagagctatttcgtgtattgtttctattatttttaataaaaagttccacttcaataatagcattctctttagtacgataagtcggggctttttctgttaaagatggtggcgaagattcttgtttcattacttctgtgtcatcggaacatgaagttaaaaacataattgtcaaaatcaataaatgtgcatgttgtttcataatttatataattaaggttaatactgaatacgttaaaagtcaaaagtgccatgtttataagaggaccgggaaggtttataataatcctcacccggggtctggggttgtataaaatcttgtctgaatatttctgtaggattatctgtaattaaatctgcatcatgggtatatatgttaaaatagcactctggatctgttttttggttatatggtccttctcccacaaaagaaaatttgtaaaaaccaattttttctccgtcttttctgactgtaaggaaccagacattaccactacttatcgttttaaatctcaatccgtttaatgatgaataagtttcctctataaactggccattcaaatatgtctgttttttacaagtaaaaggtaactcaaatctaccaccttcagctggtagaataaaaggattctgttccgaatggattttatacacaaatgtcaactttcctttatctataattagtggaattttttctacttttatgccattaatagtagagtaagaaatctgtaaatcagcattcaaaattttatcttctttattaatatttgaggttatatttaatactacctgatcgccctccacttttgtttctatatcagaaaaaagagttttatcaaattctaccgaaacatccctgggaataatcggaacctctgaacttaaaacatcatctattaatgttttttttataatcgtaatcgtaataatacgtttctctccaagacagctaaacggtttggatgcgtccttacttgttaatacttgatactctgtttttctattgttttcctctttttgacaggataacaatgctaaagaaataaacaaaagaataaatacctttctcatattaatgcaaattagttactataaataaaagtaatatttaatattgttgaaacctcaacatctgatacaatcttcaaggtcttttgtagagtttacaaacttatttccagcattataagacaattaaacaacaaactttttgttttgagggcttattttgaccgttatcttttctgtcttattggcatggttataaaacatacagtataattctgggaaaagacgttgaatttctttataatgcaaaaacttttttcatgataaaattaataatatcatactacaaagataagactaaatcgatgttttatagttatggaagaaaatataaaatctaacaaaaacatttatacacatcttataatcagatatttattattgagatgcttaatattatctaacgtaagactaacatttatattttaagacgttttgatgtcgacttaaatatccaatattagtttctaaaataaatagtaatatacaggtatactatctcaaacgattgaattttgcttccgttaaatacatatatgtctcagtaccaagaaggggtagtacagttgtcggcaaatacgaatatccgatcgtttttgagtgcaataaagtttattgtatcgactggctgtattttgtcggcaatatgaaggaactacttaattattttgaactgatggactaaacgaatgaaagtatacttctgcatcacctgccattatatagtaagtcaggcatgtatcaaaaggtatagattttgtactgccattttttaagaagtggataggcctactgggtgaaggcttctttgatatacgaggaaaaatgggtaaaggcgtacattatcttatggataaatatacctcaaaatatattcctgaatgaaagttgtatattctggaatatattttgcttttaacagaaaacaagtttcgcaaagaaaatctatgaattgagacttctattctctcacgagttgtgaagcatccgatagtacaatggaaaatatccctgattgccgaagaaacgtgattctccctcattcatcgccaaataaaaacgggagaaccgaatgctctaggtattgctcatatcctttacgtactcaggtagtccgcctatgggttgggaaatgcccgtttggcaggatttttttcccttatatagaacacaacgggctcatgagtgacacattcttcggatgggtatagcggattcagatacccctttataaatatcttttcatctcctgacaattgctgactatccatgactattcctgccatcagtccggtccagtttggcaggtatcgttttttctcttacattcgcatcaacgaatatttaaaatcgatcatatggaaatatattacattgaagccggtatctttgacaggatgctgggatgtgtcgaaagtctatcgacacgcgtggacaggctgtatgagaaaaatgcgaataaagggcttggtgagtgactggacggtcaggatgtctgcctgcgccttgacatttcttcccgtaccctgcagacccttcgtgataccggacggttggcgttcacccaggttcagcgtaaattttattacaaaccggaagatgtggagaggctgatgacttatgtcggtatgaggcgcaaggagaaggcggtgagagacagaagaaaaagcaataacttttaaaaaagcaagaaatggaaggaattatcggtaaggagagtgagagtatcctgcgtttctttattctgctggagaatattcaggtaaaaatggatcagctaatggagggtaaccgcccgccttttaacggtgaacggttcctgactgacagggagttgtccgggctgttgaaaatcagtcgcagatgtctgcaggattatcgtgaccagggtcggctcccctatgtccaactgggtggaaaggtgctgtataaaacgtcggacattgaaaaattattggaaggtaactatcacagggcgctgatataatattgccctttttaggctttaatgggatgagtgttgggactgtcaaggattccgacactcatcccattttttatctggacatttttagctcttaacccagtccgtatccttccgctttcttcttttcatgagccaatccatgtccgaggatattttctggtcagtgacttgcgcatatacctgcgtgctattgatgtttgtgtgtcccatcatcttggcgatgctttctatcggaataccggaggtcatcattagagttccgaacgaatgcctagccatatgataggataaattttccttcatccccagtgctacacccagcccgtggacctcgtaccagaggatatcccggaccggtaacggaaagaccggcttctcgttatccgtggtgttgtaaagttctagtatttgttcggctaccgggtgtaacgggataaatgcttctgcgcccgtcttagcccggcggatgcggatgtatcttcttcctagggaactcttttcaatgtggcgtggatggagtctgcgcgtatccacataggcaagccctgtgaaagaggagaatatgaatgtcctgcgtgccagctccatcatcgggtcgggcatcggggtctccattatcagtttcaactcattgcgcccgatgtgcttcaatttcggactgtccttcttctcgtatgccacgtcctctatcggattggctctcaatacttcccggtccacagcgatatagatgagcctgttaagccagcacaggcagtggttcacatgtccgttcccatgtcccagctctttcttgagaaagattttgaaggattcggcgaactcctcggtgatgtctgaaaaggcgatgtccctcatccccctggattcgatgaactgcctcagattgagctgggttgtctttgactggcgataagttgaggtggagttaatctcgactgaacggattctaagccgttcccgttctgcctctccggtctgcagcaggaattccggaatggaaacggtatttgatacggtagctttgagtaattccgccgtgaccactccctggttcttcagcaggttcccgtatgcctcttccagtcggctgcggaaagcggtaaggcggttgttttctttgttcatcctgatttctcctttgttactgtcccagtcactgggcttgcaatagatgcctgtcgtgacagctgacttcctgccgtcgatgctgatccggcagaggatggctgtcgttccgtccgatttcaccttgttacggttgatgtagaacatgagtctgaatgtactgcgcatggtaatgacgtttttaggattaaagaattagtttgagatcacgtgtcgcctcaatgaacctgtccatgtcttcgaacagtctcttcggggttacacgggcgtagatttgggtggtctttatgttggagtgtcccagcatcttgctgatggtctcgatcggcactccctcctcgagtgtgatcagagaagcgaaggaatgccttgctgtatggtagacaaggtcctggctgagtcctgccatcaggcgcagggatttcatattggccctgagcgtatggtagtcctgcggtggaaagagggtcatgcgggcatcatcacggtacttttcgatcagcacgagggcttccggcagcagcttgacgcgcccgaggtagttggtcttcttcctccggtacttcagccagagattgttttcttcatccgtgaagaggttctcccgagtgatacttaccacatcagcataggctgtgccggtgtagcaggcgaagaggaagaggtcccgggtgatgacatgcgacctgcgtttctccggaatctccagatcacgcagtttctcgaaattctcccggctgagtgctttcggtgtactttccttctgtttgggtagtttgaagtggcagaaatggtatttctccgaatgtccctccttgtaggcgatacggcagatctttttcaggatggccaggtagccgcgaagcgtgtccacggcatgtcctttttccatgaggatgaaatcctgatagtcgcggatgaactgctcgttgagttgcccgaatgccaggtccgagaccttgaacttcgccttgatgaattcggaaagcgtgcggtaggtgaagaggtaggtcgagagtgtggtgggcgcacggtctacgccaacacgggccttcatttccccattgtgtcggtcgagaagcttgagcagggtcatctgtatgcccgcattaccctgaaacatgtccctgaccgcggcggcatcgaagtcctttttcctttccatgagggaattgaaggccgagtgtacggcaagcagtagcctctctattttttcattggtttccaccgctttccggcttttgccgttcttgtccggctcgctctttttcaggtagagcagtaccttaaatttttccactttcataacgctcttttttaggttgtaaaaatactcctttgaaaagcgccctttggcatgcaaaatattgatgaacagtgaatacaaatccgctttgttcttatcgataaaaatcggttacctgtcgtcgtttcagaaacaggcggctaacagcctggtaactgaaacgctgcaatattttgttttcttttgcaggccagcctattctgcaattctcgtaaagtgcttaattataaacgttttacgttttatactcgccattccgttttttactgcatttctaaatattacttacacggcacgccacacttgggctacacttgccaaatattgccaggttcccgaagaggtgatttccgaaggactgggacattcttcacttgaagtcacacggacgtatctcaagagttttgaaggggaggaacttaatcgggcaaatatagtcgttaataattacataatcacaggggaaaagagaatgtggaatgaagcttaagatgctgttacttcgtaagtaacagagagttatcgatgctgcaaagatataagaattttaataaaaaatatattatttacaaagttattttcattagatcactaaaaaagtttcgacacaaggcaaaaaacaaggatagggatacatactagttgcaagagttatgaaaacgcatataactttttcttcccactttgaaatgaataaagcggaatacactgctatttgtctttcttgacttaaataatctgttgataatcaggattatggtagaactgcgctctgttctgtcataaaacaagtttctgttacttacgaagtaattttcgcctatacaaacggacaacttaagtataatgaagcaaaaaaataaattcataaaagagcgtcttaagcacaaacaggagcagctttccatgcaggcaatcagacaggaacgtcttaaccgtaccatgcaaaataccaaagatgatattgatcagctcatctatgcccttcacgaactggaagaagccgaaaaaggtaatcataaacgtcatactattccttataatgaagtcttcagtttctttacgcgcatctgccgtctgttcgactatcttcaacaccgttgccataaatattttaattaccggctgacctgccttgtgatacacgcccattaccgatttcgcagccggacacgggcacccggtcgtgagtatcttagtcccggaaccatacttacctatttcaagcatgaatgggaaatggttgtataacttcgaacttaaaataatcattgcatttataacacttcttttttcttagggatctgatagcgatttacattattaattaataactagagaatatgggaaaattaaaacatttaggtatgtcactcctcttggcaacaacatttttcagttgcggagatgactatgacgacactgctttgcgcaacgatgtgaacgaccttaaatcgagagtagaaaaactggaatcatggtgcagcactaccaatacacagatcagcgccttgcagggactggtttcagcattggaacagaatgactatgtgaccggagttactcctattgtagaaggatcagtagaagtgggttacactatcactttcactaaaagcaagcccatcaccatctatcacggcaaggatggtaagaacggtgctgacggtataaacggtgtcgacggcatcacccctcttattggtgcggagaaagataccgacggtatatattattggactataaagctcggtgatgccgattctgcatggttgactgatgttgataacaataaaatacctactaccggtaaagatggagaaaatggaaacgatggtgaacctggaaacaatggtgagcctggtaaggatggtgagcccggtcattctcccgttatcagtgtagatacgtttgaaggcaaactgtactggaaagtagatgatgaatggttactggacagtaatagtaataaagtggctgccaccggtgaaaagggagataccggttccgctgggaaagacggggagaaaggtccgcaaggtgagcagggggattctgttttcaaaaaagacggtgtgaaaatagaagacggcaaagtgatcttcacattagcaaatggaaaggaattcacgcttccgatgctagttgacggcctcgctgtgggtattggtggcagcgatttgttctatgcatcgccttcagacaattctatagatgtcacttttgcttctactatgaaagaggaagattataaatccattgttgctactattacgaatggtaatgaagtagactggattattaaaagtcgtggtgcggtagatacatggaaagtagcagtaacggaaccgactttcaccggcacagacggaacatatactccgggaagtgcaaagattactattacccctccggcaaatgtcaaactgtcggatacagctctattgacggtgacagtgactgacgctaatgatggtacaatatcagtttcgagagaagtgaaatattttgatggtgagatagtggcatgtaccggaggtgatttaagtatcaaaggattggatacatctgtgaaaagactggccctaaagggctctattacggtagaagattttaaatatatcagagaatcattaactgcacttgaagtgctggatatttcgatgaccgacttgactgaactgccggatcgtgcattacgtttcggtggtgatacaccaaacacttcattgaaagcagtcagactgcctttatctatgaaaactatcggttatgcagctttcactaattgcagagcattgacaagtattgatactgagaatgtggaaatcataggtgaatgggcattcgaacaatgccgcggtttggtggaagtgaaattgcacgacggattgaaagagattcgtagacaagccttcaataactgtatttcactgacattgatagatattccaggtagtgtaacagatttgggcaaaaatacagaagtatctacgtcacagtatgaaggttgggtgtttgaaaactgtacgaacttaagtacgatcactttgcatgagggtttgaagaaattatatgtctcaaccttttctcgttgtggagtcgtatctatcaatatacctacgacagtaacagatatccctgactatgcttttcaggaatgtcagaatctggagcgcgtcacatggcataatggtatcactcagataggggaggctgcatttttaagatgccgttcattaaaggctattactattcctacaggagtaacagtactcaggaataatctatttgatgaatgtgcgaatttgcagtatgtgacattacatcataatatcactgagatacaagtaagagctttctcttattgcactttacttaagtcagagtttttcccttacgaagatgcttatatagatagagcagcactccccaatgcactgcaaactttaggagcaggtgtatttacggattgtaagaacatggaaagtattaatatgcaacgtacacaggtgaaaaatatactcaggaatacatattccggatgtagtggtataactaccttctattatccgaatgtagtagaaacaatcggtgagtttgctttttcaggttgttctgcgttagtgggatcttttttcccggcttcattaacatccattgaaacaaatgcattccacttatgtacgaaaatgagccaagtttactgtttgggaagtactccacctacgcttggtacggctgcttttgattcttctctaaaatcaataagtacactatttgtgccagaggctgcgatttcggcatatagtagcagtagttggaatccctattttaaagaaataaagaaagatttactccatccataaaattcagaaattcaaatgataaccaggttccgttgcttttcttggcaagaaaggtggcggaatctttgttttgttacactgttccggcaattcgatataataaaacttaaacagattcttccattttttttattatcttttttattccatacgtttgtaaatggcaagcttttccgcaagtttgtatattattcacgctcactgattcatcgatattaattttgtagtcgtgatttttatctattcaatcctttactcacgcgtgaatatatattaatgtataaagaaaatagcttttacaattacagtagaaaaagatactctacaatatcattgtcaatcaggtggttacagaaaagtttcaaaaaagtggtagaaaatagtcagatatatttggattgtatagcaaaacctcgtacttttgcacccgctttccaagagagggacggcctaacaattgacattctgctaaagtttaaggcttcagaaaataaaaacaaaaaaacttcgaaaaaagtttggaagttatctgaaaaggtccttatctttgcatccgctttcgctaagaaagcagcgcgacagaagtcacgttagttctttgaaatattgataaacaatacaagtagtacaagaaaaaaatagaaccgtcaatacttgtcttatatgtagtaatatgtatgagtcataaggtattaatgaagtcaataaattgtacggcatcctgaacagagcaagaaccagcagcaatgctgattaacaatacttttacaatgaagagtttgatcctggctcaggatgaacgctagctacaggcttaacacatgcaagtcgaggggcagcatttcagtttgcttgcaaactggagatggcgaccggcgcacgggtgagtaacacgtatccaacctgccgataactcggggatagcctttcgaaagaaagattaatacccgatggcataattagaccgcatggttttattattaaagaatttcggttatcgatggggatgcgttccattaggcagttggtgaggtaacggctcaccaaaccttcgatggataggggttctgagaggaaggtcccccacattggaactgagacacggtccaaactcctacgggaggcagcagtgaggaatattggtcaatgggcgcaggcctgaaccagccaagtagcgtgaaggatgactgccctatgggttgtaaacttcttttatatgggaataaagttttccacgtgtggaattttgtatgtaccatatgaataaggatcggctaactccgtgccagcagccgcggtaatacggaggatccgagcgttatccggatttattgggtttaaagggagcgtaggtggacagttaagtcagttgtgaaagtttgcggctcaaccgtaaaattgcagttgatactggctgtcttgagtacagtagaggtgggcggaattcgtggtgtagcggtgaaatgcttagatatcacgaagaactccgattgcgaaggcagctcactggactgcaactgacactgatgctcgaaagtgtgggtatcaaacaggattagataccctggtagtccacacagtaaacgatgaatactcgctgtttgcgatatacagtaagcggccaagcgaaagcattaagtattccacctggggagtacgccggcaacggtgaaactcaaaggaattgacgggggcccgcacaagcggaggaacatgtggtttaattcgatgatacgcgaggaaccttacccgggcttaaattgcatttgaatatattggaaacagtatagccgtaaggcaaatgtgaaggtgctgcatggttgtcgtcagctcgtgccgtgaggtgtcggcttaagtgccataacgagcgcaacccttatctttagttactaacaggtcatgctgaggactctagagagactgccgtcgtaagatgtgaggaaggtggggatgacgtcaaatcagcacggcccttacgtccggggctacacacgtgttacaatggggggtacagaaggcagctacctggtgacaggatgctaatcccaaaagcctctctcagttcggatcgaagtctgcaacccgacttcgtgaagctggattcgctagtaatcgcgcatcagccatggcgcggtgaatacgttcccgggccttgtacacaccgcccgtcaagccatgaaagccgggggtacctgaagtacgtaaccgcaaggagcgtcctagggtaaaactggtaattggggctaagtcgtaacaaggtagccgtaccggaaggtgcggctggaacacctcctttctggagcgatgtcgtaacaacgatttcataggttctattattgtactactggtacttgtttatttataacatatagatcaaccatctatagaagtatagatagagataaacaagagaaataaagaagccgagtctaacatcaggtagacaaggttgaactagtcctatagctcagttggttagagcgctacactgataatgtagaggtcggcagttcaactctgcctgggactactccgaacaaaaattgtcgttgccaatacgttattgcgatgttcaattactcttgggggattagctcagctggctagagcatctgccttgcacgcagagggtcaacggttcgaatccgttattctccaccatctctgaaaacagagaaacgatctttgacatgatgtacaaaaagtaaaatttagtaaagagctaaaagtatatatcgaaccgtacgttttaagtaccgcgatattgagtacccgggtttaatacctgatacttgatacctgatacttaaaggtaagtttgaaagaaagtaagcaagggcgcatggcggatgccttggctctcggaggcgatgaaggacgtgataagctgcgataagctctgggtaggtgcaaataacctttgatccagagatttccgaatgggacaacccggcattctgaaggaatgtcatccatctttgatggaagctaacgcagggaactgaaacatcttagtacctgtaggaaaagaaaataataatgattcccctagtagtggcgagcgaacggggaatagcccaaaccacccatgttacggcatgtgtggggttgtaggaccacgatgtcgcaagacatttgacgagtagaatcctctggaaagtggaaccatagacggtgatagtccggtatacgaagtcaaattaagcgtagtggtatcctgagtagcgcgggacacgagaaatcttgcgtgaatctgccgggaccatccggtaaggctaaatactcccgagagaccgatagcgaaccagtactgtgaaggaaaggtgaaaagcacttcgaatagaagagtgaaatagtccctgaaaccgtgcgcctacaagcggtcggagctgcgtaagcagtgacggcgtgccttttgcataatgaacctacgagttactttttccggcaaggttaagcatcttgagatgcgcagccgaagcgaaagcgagtctgaacagggcgtcgagtcggaaggagtagacgcgaaaccaagtgatctacccttggtcaggttgaaggttaggtaacactaactggaggaccgaaccgataagcgttgaaaagcttccggatgaactgagggtgggggtgaaaggctaatcaaacttggagatagctcgtactccccgaaatgcatttaggtgcagccttgtgagttactaatgtgaggtagagcgactgataagatgcgagggcttcaccgcctatcaagtcttgataaactccgaatgcgcattagttctatcacaggagtgagggcatgggtgctaaggtccatgtcctaaaggagaagaatccagaccatcagctaaggtccccaaataaacactaagttgaactaacgaagtcagattgctaagacagctaggatgttggcttggaagcagccattcatttaaagagtgcgtaacagctcactagtcgaggagtttggcgtggataataatcgggcattaagtgttttaccgaagctatgggatcagtaatgatcggtaggggagcattccactctgcgtcgaaggtgaagcgtgagctttgctggagcgtgtggaaaagcaaatgtaggtataagtaacgataaagggggtgagaaaccccctcgccgaaagactaaggtttcctgatcaacgctaatcggatcagggttagtcgggtcctaaggctcagccgaacggtgaggccgatggcagaacaggttaatattcctgtactaccttaaggagtgacgtggagacggaggcgtgacagcgccgcggactgacggaatagtccgttgaagggtgtagatgctgattatcccaggcaaatccgggataagagtcgaacctgatagtatggagcgttcttcggaacaatccaatagtgcgtgtaatcatactcccaagaaaatccgctaaacttaatccttgaggtacccgtaccgcaaacggacacacgtagtcgggttgaatatactaaggcgcttgagtgattcacggttaaggaactaggcaaattgaccctgtaacttcgggataaagggtcccaacgagagttgggcgcagagaataggtccaggcaactgtttaacaaaaacacagggctgtgccaaattgaaagattacgtatacagcctgacacctgcccggtgctggaaggttaagaggagatgtcatcgcaagagaagcattgaattgaagccccagtaaacggcggccgtaactataacggtcctaaggtagcgaaattccttgtcgggtaagttccgacctgcacgaatggtgtaatgatctggacactgtctcaaccgtgagctcagtgaaattgtagtatcggtgaagatgccgattacccgcgatgggacgaaaagaccccgtgaacctttactatagcttaacattgaatttgggtaattgatgtgtaggataggccggagactttgaagcaggtacgccagtatttgtggagtcgctgttgaaatacggccctttgattatttgagttctaactcgtggtacgaggacactgtttggtgggtagtttgactggggtggtcgcctccaaaatagtaacggaggcttctaaaggtgccctcaggacgattggtaaccgtccgtagagtgtaatggcataagggcgcttgactgggagactaacaagtcgatcaggtaggaaactagagcatagtgatccggtgtttccgtatggaagggacatcgctcaaaggataaaaggtactccggggataacaggctgatccctcccaagagctcatatcgacggaggggtttggcacctcgatgtcggctcgtcacatcctggggctggagaaggtcccaagggttgggctgttcgcccattaaagtggcacgcgagctgggttcagaacgtcgtgagacagttcggtctctatctatcgtgggcgtatgaaatttgcgtggctctgacactagtacgagaggaccgtgttggactgaccgctggtttaccagttgtgccgccaggtgcattgctgggtatctaagtcgggattggataagtgctgaaagcatctaagtacgaagccagccacaagattagatttcttagggtcgttaaagacgatgacgttgataggatgcaggtgtacaggtggtaacatcaaagccgagcattactaattgcccgttcactttctttcggacggtgcggatcgcgatatatacgtttagcgagcgtatcagtaagttcattcatttgactctgatatcttacttaagttttacttttcatcatgtcataaccttattgaatttattcaggtggttatagcacgagggttccacctcttcccattccgaacagagaagttaagcctcgtcacgccgatggtactgcgtaacagtgggagagtaggtagccgccatttttagaaagtccccgccagtcatctttgattggcggggatttcttgtttatacactttcttgtcagatttttgggttctcctgcttattttctatgattcagccaaatttatattctttttcttttgttatttcggaatgaatatatatttttgtagtgtactattaaactaatacactagacgtcgtgtattaactataagaacttaaaaattaatattatgattaaagctgaaaatttgtcttttatctatcccaaatcaaagcgcatggtattacacgacttttctttctctttagaggctggtcgggtttatggactgttaggacgcaatggggcggggaaatctactctcctttatttgatagccgggttattgactccgaaaaaagggaaaatagtgttccatgatataaatgtccgttctcgtctgccaatgacgttgcaggatatgttcttggttccggaggaatttgaattgccttctattccattgaaaaagtatattgaattgaatgctcctttttatccgaactttagcaaagaggatatgcacaagtatcttcattgttttgaaatggatatggatgtgaatttaggagcactctctatgggacaaaaaaagaaagtgtttatgagttttgctttggctaccaatacttctcttctgctgatggacgaaccgaccaatggactggatattccgggaaagagccagttccgtaaatttatggcatcggggatgacagagaataaaactattgtaatttcaactcatcagatacgtgatatagacaaaatgctggattcagtcatgatcatggatgaaagccgggtgttgctgaacgaatcaatagtgcgtatttgcgagaaattgtgcttcaaggaaagtgatgaccgtagcctgatggataaagcgctttttgctgtcccttctctgcaggggaatagtttgcttttactgaatgagtatggcgaagattcggatatcaacctggaactgctatttaatgcaacactggcacaaccacaaaagatcactaaattgtttcacgctcaatatgaatagattatgataaaggatacattttttagtttttcccgtttcggaaaattactccataaagaggtttcggaaaattggaagttgtatatgcttcgtacattaatgatatatggagttttgacaatcgcattgatatgggccggctatttcgaatacaaaagctataatccgcttttttcgtttgacgacgcgaatgtacatgtaactactctgatcacctggatgtgggtttggtggggatttacatgtcttggtgcttcgtttgcatttgaatcaatgaagtctaaaacaagacgtattacaaatttaatggtgcctgctactacttttgaaaagtactttcttcattggctgatctatgtacttattcttccattgcttatctatttctttataatattggcggactatacccgtgtatttgtttgtgcaatgatatattcggaagtcccttctatagaagcgacgcaatttaagtatttcgttgatcagggagatggtaaatattcgttatgtcacaactggtcggagggaactttattgattttgcttaatctgtatattcaatctttatttttgttgggcagtattttctggtctaggaatgcttttattaaaacacttataatcctggttgtcattggctttgtgtattattggagtggagtagttgctgttcatctatttaaagattgtgatattataaatttgaattcatttatctttaagtggggacatatactattccctgtattaactattataaattgggtcttgacttatttccgcttaaaagagtcagaagtaattcatcggatgtaaaaaaggagggtatgtatgaattttaaagaaagcagagcaatatatttacagatagccgatcgcatttgtgatgacatcttgttgggacaatatgaagaagaggggcgtatttcttcagtcagggaatatgcatctattgtagaagtgaatgcaaatacagtgatgcgctcgtacgagtatcttcagtctcaggaagtgatttacaataaacgaggcattggcttttttgtagcttccggagcaaaggcactgattcattcgttgcgaaaagaacagttcctgaaagaagaggttgatggctttttccgacaactttatacactcggcatctctatcaaagaaatagagaagatgtattatgaatttatacaaagacaaaatcaataaaaataaataagatatgaaacgcacaacatatataatcataggactttttgtactgggtttattactgatacctatccttctgaggacacctgcggccgagaaaacagctcatcgtttaacaatggaaggggaacgtactgaaatagaaatggcagggattcgtcatgtgaagatagttgaaaagctaggggaaattgataaagatgatataggagtattgggtaagttggatgtacaggcttcatccttttcggataagagtatattggtgtatccgaagagcaaatatctgaatgtgagccaagaaggggattgcctgttggttgaaataaatctggacgataaaggtctttctcaaataactggagagatagaaaaaggagctagattagttttaggtggtttgaatatggaattaaaaacggattcgacattactttctattgaaaatcgtgtgagtagggtgaatattaatgtaaagaagatgaatttggactctttatatctctttaatgacgaatggcaggacatctcactagaatcttgtagttttcgttcgttggatataagagggaagaaactgagcttgaaggctaatcaagtgaaggcaataaattattatgaagaattagggactatcaggagtagtgagatttccggattcagtgttgataatttgtatctgtcaggaaaagattcgcatagatatcggacaggtatcaactgcaagcgtatcttttggaatcccttagctaaagatgcggaacttgagcttactttgagacagaagggtgagattatattgaatcgttgaatataaacggaaaggaaatgaaaactataaagtattttgctgttttaagtctgttggttggtttgtccggctgtaactcaaaaccggacttagacggattccgggaagtagagataagtaataatatgctggatactataccggaaaacagattgaataattataaagaaacgatcgaaaaaacttatttattgggttgtctggtattgggtacagccggtagttcgtcggaaagtagtccggctcaactgaaggaatggaaagagtctttgaatatgcccgacacgataaaaccgatctatagggagaggctgtgggactttgtcttttatccacaaattacgtatgaagttgaatccagatacctgggtatctatcaacggagaaaaactgtaattaaaggtatcgggcttggtatgattacaggaaaagaagaagaatatatcaaatcaaggcagaaataattcattgttggtgctttattcgttataatattttaagacaggtgtcatttagtaatattaccgtgagaaaagcggaataaaattggtgtaaaagtgtgattttataagaagagagtcgatttctttgcatctttctcttttttatcaaattgatttttgtaaatttggcgagaatctattgaaggaacataattaatacagtaataatactaaatactcctgttaatatggaaaacaaaattcaagagttgaccgataagatttatcgtgaaggcgtggaaaaaggaaacgaagaagcgcagagacttatcgcgaatgctcaggatgaagcaaagaagatcattgaggatgctcgtaaagaagcggaatcaattgtcgctgcctctcgtaaatctgctgatgaactggcagataatacaaaatcagagttaaaactattttccggtcaggctgtcaacgcactcaaatctgagattgccacgatggtcactgacaagttgataaccgcttctgtgaaggatttcgctcaggataaggattatctgaatgcgtttatcgttgcgctggcatccaaatggagtgtagatgaacctatcgtcatctctacggccgacgctgaatcactgaaaaagtattttgcagcccatgcgaaagctttgttggataaaggtgtgaagatcgaacaagtgaacggtatcaagactttatttacggtttctccggcggacggttcgtataaggtgaacttcggagaagaagaattcatgaattacttcaaagcgttcttgcgtcctcagttagtagaaatgctattttaaaaggagcgactatgggtagtaaatactattacttggtagccggtttgccggaactcactttggaggacagtaaactgagctatacagtagccgattttaaaacagagatctatagcggattgtctgcttcagaccaaaagttgatcgacttgttctatctgaagtttgataatgccaacgtgctgaaactcctcaaagacaaagaggcggaaatagacaaacgtggaaactactctgccgcggaactcaccgaatatatttctattctgagagaaggcggggaaatcagccctaaagaatttccttcttatctgtctgtttttatttccgattatctgaatacacctgccgaaagcatggtgttgcaggaagatcatttggctgctttatattatgagtacgccatgaaatgtggaaataagttcgtctcttcctggtttgaattcaatctgaacattaataatattcttgttgcatttaccgctcgtaaattcaaatgggatattgctgcccatatcgtaggaaacacggaagtatgcgaagccttgcgtacatccagcgcccgcgatttcggattgtccggtgaggtggatgtttttgaatcgttggtgaagatcagtgagatcacggaactggtggaacgtgagaagaaattggatgctctgcggtggaactggatggaagatgctattttcttcgactatttcaccgttgaacgtattttcgctttcttgctgaaactggaaatgattgagcgttggatttcattggataaggaaagaggaaatcaattgttccgaagcatcattgaatcgctgaagaatgaagtacagattcccgcagaattcagataataaattttaaaaaatatatggcaacaaaaggaactgttagtggcgttattgccaacatggtgaccctcgtcgttgacggaccggtagctcagaatgagatttgttatatctctaccggtggcgataagttgatggcggaggtgattaaggtggtaggtgcaaacgtatatgtccaggtgttcgaaagcacccgtggactgaaggtaggtgccgaagccgaatttacaggacacatgcttgaagtgaccttaggtccgggtatgttatcgaagaactacgatggtctgcaaaacgaccttgacaagatggacggtgttttcctgaaaagaggacaatatacatatccattggataaagaacgtatatggcattttgttccgatggtgaaagccggcgataaagtcgtagcttccgcatggctgggacaggtggacgaaaacttccagccgctgaaaattatggctccgtttactatgaacggaacggctaccgtaaagaccattatgcccgaaggagattataaaatagaagataccattgcgatcctgacagatgaggaaggaaatgacattccggtaacgatgattcagaaatggccggtaaaacgggctatgacgaattacaaagaaaagccgcgtcctttcaaattgctggaaaccggtgtacgtgtaatcgatacgctgaacccgattgtggaaggcggtacaggatttatccccggcccgttcggtacaggtaagacagtgcttcagcacgctatctccaaacaggcggaagcggatatcgtaattattgcggcttgtggtgaacgtgccaacgaggtagtggaaatctttacagaattcccggaactggtggacccgcatacaggacgcaaattgatggaacgtaccatcattattgcaaatacttccaatatgccggtagccgcccgtgaagcgtctgtatatacagcaatgtctctggctgagtattaccgttcgatgggattgaaggtattgctgatggctgactctacttcccgttgggcgcaggcgttgcgcgaaatgtccaatcgtatggaagaattgcccggaccggatgcgttcccgatggatatttctgctattatttctaacttctacggtcgtgcaggttatgtgaaactgggtaacgacgaaaccggctcaattactttcatcggtacggtatctcctgccggtggtaacttgaaagagcctgtaacggaaaatacgaagaaggtagcccgctgtttctacgcattggaacaggatcgtgccgacaagaaacgctatccggccgtgaacccgattgactcttattccaaatatatcgaatatccggaatttgaagaatatatcaaggagcatatcaatgacgaatggatcggcaaggtgaatgaacttaaaacccgcttgcagcgtggtaaggaaatcgccgagcagattaacattctgggtgatgacggtgtacctgtggaataccacgtgattttctggaaatccgaattgatcgacttcgtaatcctgcaacaggatgcctttgatgaggttgactcggtgactccgatggaacgtcaggaagctattctgaatatgataatcgacatctgccatacagaatttgaatttgacaatttcaatgaagtaatggattacttcaagaggatgatcaatgtatgcaagcagatgaactactcgaagttcaaatctgagcagtacgaaggattccagcagcaattaaaagaattgattgccgaaagaagcgttaaatagtaaattgtaaatagctaaattgtaaatatatagatggcaacaaaagcttttcaaaagatatataccaagattactcagattaccaaggctacttgttcgctgaaagcgacaggagtagggtatgacgagcttgccactgtgaacggtaaactggcacaggtggttaagattgccggtgacgatgtcactttgcaggtatttgaaggtacggagggtattcctaccaacgccgaagtagtgttcctcggcaaatcgcctacgttgaaagtgagtgagcagttggcaggacgtttcttcaatgctttcggtgatccgattgacggaggtccggaaattgaaggacaggaagtggaaatcggtggtccgtcagtgaatccggtgcgccgtaaacagccgtcggaactgattgcaacgggtattgccggtatcgacttgaataacacactggtatctggtcagaagattccgttcttcgccgaccccgaccagcctttcaatcaggtgatggcaaacgtggcattgcgtgctgaaacagataagatcattctgggcggtatgggtatgacgaacgatgactacctctactttaagaatgtattctccaacgccggtgctctcgaccgtattgtgagcttcatgaatacaacggaaaatcctccggtagaacgtctgctgattccggatatggcactgactgctgccgaatacttcgctgtaaacaataacgagaaagtattggtactgctgaccgatatgaccagctacgccgatgcgttggctatcgtatccaaccgtatggaccagattccgtccaaagattctatgccagggtcgctctattcggatttggcgaagatttacgaaaaggcggtgcaattcccttccggtggttctatcacgattattgcggtgacaacgttgtccggtggagatatcacacatgctgtgcctgataatacgggttatatcacggaaggacagttgttcttgcgtcgtgacagtgatatcggtaaggttattgttgacccgttccgttcattgtcccgtctgaaacagctggtaaccggtaagaagacacgtaaagaccatccgcaggtgatgaatgccgctgtacgtctgtatgccgatgctgcaaatgcgaagactaagatggaaaacggtttcgacctgacaaattacgacgaacgtacgttggcttttgcgaaggactattctaaccagttgctggctattgatgtcaaccttgatactactgaaatgctggatgtggcctggggcttgtttggcgaatacttccgtccggaagaagtaaatatcaagaaggaacttgttgaccagtactggccgaaaggagaataatcagcaactaaatttataaccaataattagcaaaaacaacgtggctataaagtttcaatataacaaaacctctcttcagcagctcgaaaagcaactgaaagtgcgggtgcgtacgcttcctatcatcaagaataaggaaagcgccctccgcatggaagtgaagcgctgtaaaacggaagctgccgatctggaggataggctcgaacaacaaattcaagcctatgaagccatgttcgccctttggaatgagtttgacgcttcattgataaaggtgaatgacgttcatcttggcgtaaaaaagattgcgggtgtacgtgtaccgcttctcgaaaatatcgatttcgagatacgtccgtacagtatgtttaacgctcccaaatggtatgccgacggtatccatctgctggaggaacttgcgcatacggcaattgaacgtgagtttatgctcgccaagctgaatctgctagaacatgcgaggaaaaagaccactcagaaagtgaatctttttgagaaggtacagataccgggctatcaggatgcattgcgaaagatcaagagatttatggaagatgaagagaacctgtcgaaatcatcgcaaaagatcatgaagtcccatcaggaaaaaaggaaggaggaagaggcatgattacaaaaatgaagaaactcacattcctggtttatcataaggaatacgaagaattcctgaacagtctgcgcgaacttggtgtagtccacatcgtggagaaacagcaaggtgctgccgacaatacggaactgcaagaaaatatccgtctttccaaccgtctgacagctactctgaaattgcttcagaatcagaagcatgagaaagatgctgtggtcgcaacggaaggagggacagctgctcgtggtttgcaggtattggatgaagtagatgctttgcagactgaacacggcaaattgtctcagcaattgcagggctatgccaaagaaaaggaagcattgcaggcatggggcaacttcgatccggcaagtgtccggaagttgaaagatgccggctatgtaatcggtttctatagctgttcggaaggaaactaccagcaagaatgggagacggaatacaatgcgatgatcataaatcgtatttcttccaaagtattctttgtgactgtcaccaaagccggtcaggaagtggatctggacgttgagcaggcaaaacttcccgcctattcgctggcacatcttgaaacgttgtataatacaacggagcaggctatcgaagagaacgaaaagaagttggtaacgctttctgaaacagatgtaccttccttgaaggttgctttgagggagttgcagggacagattgaattctcgaaagtagtattgagttctgaacaggctgccggtgataaactgatgttgattgaaggatgggctcctgcctatagtaaggtggagatagaagcctatctgaatgacgcacatgtatattatgagataaccgatccgatgccgggtgataatgttcctattcgattgaataacaagggattctttgcttggtttgaaccgatctgtaaattgtatatgcttccgaagtataacgaactggatttgacaccgttcttcgccccgttctttatgatcttcttcggactctgtctgggagattccggatatggacttttcctgttccttggggctacggcatatcgcttactggcaaagaaggtgactccgtcaatgaagtcgattctttcgctgatacaagtattggctgtttcaactttcttctgcgggttgctgacaggtacattcttcggagcgaacatttatgatctggactggcctatcgtgcaacgtctgaaacacgcggtgctgatggataacaacgatatgttccagttatcattgattttgggtgctattcagattttgttcggtatggtgctaaaagcagtcaatcagacgattcagtttggtttcaaatatgcagtggcaacgatcggatggattatcctgttggtttcaatggctgtttcggctttattgccgaacgtactgccgatgggaggtacagtgcatctggttattctgggtatctccggtgcgatgatattcctctataacagtccgggaaagaacatattcatgaatatcggacttggtttgtgggattcatataacatggctaccggtctgctgggagatgttttgtcctacgttcgtctgtttgccctcggactttccggaggtattctggcgggagtgttcaacagtctggcagtaggtatgagtccggataacgtgattgccggtcctatcgtaatggtgctgatctttgtgatcggtcatgcaatcaacatctttatgaatgtgcttggtgcaatggttcacccgatgcgtctgacatttgtagagttcttcaagaactccggttatgaaggaggcggcaaggagtacaagccttttagaaatttagaataaaacattgagaaataataaactaagaattaaacaataaaaatagaataagattatggaaatgaatttgtttattgcctacattggcatcgcggttatggttggtttgtcaggcattggtagtgcttacggagtaactattgcaggtaacgctgctatcggcgcattgaaaaagaatgatagtgcattcggtaacttcctggtattgactgcgcttccgggtacacagggtctgtacggttttgccggttactttatgttccagactatcttcggtatcctgactcctgaaatcactgctatccaggcatcggcagttctcggtgcaggtatcgctttgggattggtagccttgttctcggctatccgtcagggacaggtttgtgcaaacggtatcgctgctatcggccagggacacaacgtgtttagtaatacattgattcttgccgtattcccggaactttacgctatcgttgctttggctgccactttcttgatcggtagtgcacttgcgtaaatttttcaaggaaaaaattttttaataaagatctttcaatccccttgtgaatgcagctttgcgttcgcaaggggatattcttttttcatggcgggctaacctttctttcctcttattaactcatatttttcgcataaagtattatttttcaaagaataatgcgtacttttgcactcgcatactaaaaagagttttaatatattatatggtaaaagatttattaacccccgattatatcttcgagtccagttgggaagtatgtaataaagtgggagggatatacaccgtattgtcgacacgggcgaatacattgcaggaaaaattccgcgacagaatttttttcataggtcctgatgtgtggcaaggaaaagagaaccctctattcatcgagtcggataatctgtgcgctgcctggaaaacgcatgcacttgaaaacgatcatctttccgtccgtataggacgatggaatatacccggtgaacctattgtcattcttgttgatttccaacctttttttgaaaagaagaacgatatatacacagaaatgtggaatcgttttcaagtagactcgttgcacgcttatggcgattacgacgaggcttctatgttttcgtacgctgctggaagagtagtagaaagtttctaccgctacaacctgacagaaacggataaggtggtatatcaggcacatgaatggatgaccggaatgggagcactttatgtacaggaagctgtccccgaagttgctactatttttacaacccacgctacttccatcggacgttcgatagccggcaatcataagccgctgtatgactatctgtttgcgtataatggcgatcagatggcacaggaattgaatatgcagtcgaagcattccatcgagaagcagacggcgcatcatgtagactgttttacgacagtaagtgaaatcaccaataacgagtgcaaggaattgctcgacaaaccggcagatgtagtactgatgaacggtttcgaagacgatttcgtacccaaaggcaatacatttaccggaaaacgtaagcgtgcgcgctcattaatgttgaacgtagccaataaattgttgggaacaaatctggatgatgatacgttaatcatcggtaccagtggtcgttatgaattcaagaacaaggggatcgatgtctttctggagtcattgaaccgtctgaacagagataaaaacctgcataagaatgtattggcattcatcaatgtacccggttgggtgggagatccccgtgaggatttgcaggcgcgattgaaaagcaaagaaaagttcgacacaccgcttgaagttcctttcatcactcactggctgcacaatatgacgcatgaccaggtattggatatgctgaagtatttaggaatgggcaatcgtcccgaagataaagtaaaggtgattttcgtaccttgctatctggacggtcgtgatggtattatgaacaaagagtattatgatatattgctgggacaggatttgagcgtttatgcttcctattacgaaccttggggatatactcctttggaaagtgtagcgttccgtgtacctacaattactactgatctggcaggctttggcctttgggtgaacagtctgaagaatcagcatggcatcaatgatggagtagaagtgctgcatcgttcggactataatgattcggaagtggcggatggtatcaaggatacgattacgctctttgcggataaatcggaaaaagaagtgaaggaaatccgcaaacgtgcggcagatgttgcagagcaggcactgtggaagcacttcattcaatattattatgaggcttatgacattgctctgcgcaatgctctgaagcgtcagttaagctaaaaaaacattttattcatcaataagtaaacaaaaacattatgaaaattaaagttagtaatgtgaatactccgaactggaaagaggttacagtgaaatcacgtatccctgctgagttggagaaattgtccgaaatttcacgcaacatctggtgggcatggaattttgaagcgacagaactatttagagatctagatccggaactttggaaagaatgtggacagaatcctgtgttgttgctggaacgtatgagctatgagaagctggaagctttggcaaaagacaaggtaattctgagaagaatgaatgatgtttatacaaaattcagagattatctggatgtgaagccggatgagaatcgtccgtctgtagcctatttcagcatggaatatggtttgagtagcgtcctgaaaatatattccggtggtttgggtgtattggctggcgactacctgaaagaagcttctgacagcaatgtagatctttgtgcagtaggtttcttgtaccgttacggctactttactcaaacgttgtctatggatggtcagcagattgctaactatgaagcacaaaacttcggtcagcttcctatcgaccgagtgatggatgcgaatggtcagccgttggtagtggatgttccttatctggactattatgtacatgctaacgtatggcgcgtaaacgtaggacgtatttctttgtatctgttggatacggataatgaaatgaacagcgaattcgaccgtcctattactcaccagctttatggtggcgactgggaaaaccgtctgaaacaggaaatcctgttgggtatcggtggtatcctgacactgaaagcattgggcatcaaaaaagacgtttatcattgtaacgaaggacacgctgcattgatcaatgttcagcgtatctgcgactatgtagctaccggactgacatttgatcaggctatcgagctggttcgcgcttcttctctttatacagttcatactccggttcctgccggtcacgactacttcgacgaaggtttgttcggtaaatacatgggcggttaccctgcaagaatgggtatcagctgggatgacctgatggaccttggacgtaataatccgggggataagggcgaacgtttctgcatgtcagtatttgcttgcaacactgctcaggaagtaaacggtgtaagctggctgcatggaaaagtatctcaggagatgttctctactatctggaaaggttacttccccgaagaaatgcacgtaggttatgtgactaacggtgttcacttccctacatggagtgctacggagtggaaagaactgtactttaaatatttcaatgaaaacttctggttcgaccagtcgaatcctaagatttgggaagcaatctataatgtgcccgatgaagagatctggaagactcgtatgacgatgaagaacaagctggtagattatatccgcaagtcattccgtgatacatggctgaagaatcagggagatccttcacgtatcgtttcattgatggataagatcaatccgaatgcattgctgatcggtttcggtcgtcgttttgctacttacaaacgtgcgcacctgctgtttactgatctggaacgtctttctaagattgtgaacaatcctgactatccggtacagttcctgtttacaggtaaggctcacccgcacgatggagcaggacaggggctgatcaaacgtattatcgaaatctcccgtcgtccggaattcctgggtaagatcatcttcctcgaaaactacgatatgcagttggcacgtcgtctggtttccggtgttgatatttggttgaatactccgactcgtccgttggaagcatccggtacatctggtgaaaaggctttgatgaacggtgttgtcaacttctctgtattagacggatggtggctggaaggttaccgtgaaggtgcaggttgggcgttgactgaaaaacgtacatatcagaatcaggaacatcaggatcagttggatgctgctactatctacagcattcttgaaacagaaatcctgccgttgtactatgctcgtaacaagaaaggctactcagaaggctggatcaaggtagtgaagaattctatcgctcagatcgctcctcactatacgatgaaacgccagttggacgactactacaataagttctacaataagttggcaaaacgtttccatatgctgtctgctaatgacaatgcaaaagcaaaagaaattgctgcatggaaagaagaagtcgttgccaagtgggattctatcgaaatcgtatcttgcgacaagctggaagatttgaaagccggtgatatcgaaagcggaaaagaatatactattacttacgtaatcgatgaaaaaggcttgaatgatgctatagggcttgaactggtaactacttatacaactgcggatggtaaacaacacgtttactctgtagaaccgttcagcgttatcaagaaagaaggcgacctttacacattccaggttaaacatagcctgtcaaatgccggtagcttcaaggtgtcttaccgtatgttcccgaagaatccagaacttccgcaccgtcaggacttctgctacgtgcgttggtttatctgatagcttgacgaagtagggaagtgacgcttccctgcttgacgtccctatataaaagaagcccctgcaattcgagcgatcgaaattgcaggggctatctttttatatctcaatgtaacggtgtggataagatcagtattttcggcaaaagtgcctgtacttggatcagatttacctactgcgttaacaggaataagataccttgtcggatgttgtgccatcctattggcacaactgtgccaacggcgtggcataactgtgccaatatggtggcacaagtgtgacaacggtatggcacaagtgttacttcattaggtgaagtctcttatcagcttcatttatttgactacttctgccaatttagcctgaagaccttctccatgaagaccacgggcaatgatagtaccgtcgccatcaatcagaacagtgtgaggaatgctgttcactgcataaagctgtgcgccttcactctgccagaactttaggtcagacatttgcggccaggtcatattcagttttttaatagactctttccatgcagcagcatcctgatccagagatacaccgacgatttcgaagtttttgcctttgtactgagcgtaagcttctaccaggttaggcatttcacgacggcaaggaccacaccagctagcccagaagtctaccagtaccactttacctttacctgcgtaatcagacagtttcacagtttttccttccggagtctgcatttcgaagtcaatgaacttagtacctacggcagtcttcttttgtttttcagtctgttccttaacttttacgattgtttcgtcattttggaaattagccgggatttgttccagcaaagctgcattctcttcagtagagttattgtagaaagtctgtttgaacaagaatacacctaccgggttggtgatgtttttctgtacaccttctttgattactttatcatattcttcttccagccgggcaccttctttttgcttggcttctttctgctcgtcactcaaagaagaatctcccatcgcttcgtagatagcgttcatcttttggctgatatcattgatttgagttctgatagcttggtaagcgtcattgttggaagtaccggttgcagaatcattgtcctttgtcagtgcaatgtttattttaccgttttcaaggaagaaatcaatcatcagaggttctccgttcacttcgcaagtgacataacggtttactgcagaatcctgtgtgccttcgaaggtgaaagtacctttagagatgactgcggtatctagttttgtaagatttctgcctgttgcttcctgaaggtaaacagtgtcgccgtcagcagcgccttctactgtacctgtgataacgtatccggctttgtttccggtacaagctaccatacccaacgctgccgtcgcaataactaaataagttaactttttcatgcttttgtaaaattagtgaataaatatttatgcaaagatagattttttttctgtctggcatcgaaaaacactgttatattagattaacacgtaggtggaaatcgtagaaatgtgtacctttgcagcccaaacttttagtatgaatatgcaagaagacaaatccatcattgaggttagccatgtatcgaagttttttggcgacaaaacagctttggatgatgtaactctgaacgtgaaaaagggcgagtttgttacgattctcggaccttccggctgcggaaaaacaacattgttgcgtctcattgccggttttcagacagcttcggaaggcgaaatccgaatatcgggtaaggaaatcacacagactccaccccataaacgtccggtgaacacggtatttcagaaatatgccctgttcccgcatttgaatgtatacgacaatattgctttcggcctgaagctgaaaaagacgccgaaacagacaatcggcaagaaggtgaaagccgcattgaagatggttggtatgacggattacgagtatcgggatgtagattctctttccggtggccagcaacagcgtgtagctattgcccgtgccattgtcaatgagccggaagtgttgctgctcgacgaaccgttggctgcgctcgacctcaaaatgcgcaaggatatgcagatggaactgaaagaaatgcataaatctctgggcattacatttgtatacgtaactcatgatcaggaggaagccttgacattgagtgatacgattgtcgtgatgagcgaaggaaaaatccagcagatcggtacgccgattgatatctataatgagccgatcaattcatttgttgcggattttatcggagaaagtaatattctcaacggaacgatgattcatgataaactggtacgcttttgtggtacggagtttgaatgcgtggacgaaggtttcggtgaaaatactccggtggacgtagtcattcgtccggaagacctttatattttcccggtttcggagatggcgcaactgaccggtgtggtacagacttcgatcttcaaaggggtacactatgaaatgactgtgctttgtggcggatatgagttccttgttcaggattatcatcattttgaagtcggtgcggaagtggggctgctggtgaagccgtttgatattcatattatgaagaaagaacgtgtatgcaatacatttgaaggaaagttgcaggatgctactcatgtagagttcctgggctgtacgttcgaatgtgcttctgtggaagggctggaatccggtacggatgtcaaggtcgaagtagactttgataaagtgatcttgcaggataacgaagaagacggtacgctgacgggagaagtgaagttcatcctttataaaggtgatcattaccatctgactgtatggtctgactgggacgagaatgtgtttgtggatacgaacgatgtctgggatgacggagaccgtgtgggtattactatccctccggatgcgattcgtgtaattaaaataaccgattaacaggaaaggaagtgaataagaagtttatagtatttttgtcatcacgtaagagctggactcttccttacattattttctcggcgatctttgtggtcataccgttggttctaattgtcgtgtatgcgtttaccgatgataacgggcatctgacactcgccaattttcagaaattcttcgaacatcccgaagcgatcaataccttcgtctattccataggtattgccattattacgactcttatctgtatcctgctgggatatcccgcagcctggatattaagcaacagcaagctgaaccgttccaaaacgatggtggtgctgtttatcctgcccatgtgggtgaatattctggtgcgtactcttgccactgtcgctttattcgactttttcagcgttccgctgggagagggagcactgatcttcggtatggtttacaactttatccccttcatgatctatcccatctataacacattgcagaagatggaccatagctacattgaggcagcgcaggacttgggggctaatcctgtacaggtctttttcaaggcagttctcccactttccatgccgggagtcatgagcggtatcatgatggtgtttatgccgaccatttcgacattcgccattgccgaactgctgacgatgaacaatatcaaactctttggtactaccattcaggagaatatcaataacagtatgtggaactatggagcggcactttcgctgatcatgctgctgctgatagccgcgacttcactgttcagtaccgatgataaggataatacgaacgaaggaggtgggctatggtaaagaagatattcgctcagacttacctgtgggtattgctgctgttgctatattcccctattgtgatcattgtgatttattcttttaccgaggcgaaggtattaggtaactggaccgggttttcgaccaaactttattcatcactgtttaatacaggtgcccatcattctctgatgaatgccctagttaataccattaccattgcgctgctggctgccacggcatctaccttgttgggcagcattgctgccatcggcatcttcaacttaaaagcacgctcgcgcaaggcgattggttttgtgaatagtattcctattctgaacggtgatatcataaccggtatatcgcttttccttttattcgtatctctcggaatcacgcagggatataccacagtggtactggcgcacatcactttttgtactccttacgtcgtattaagcgttctgccgcgcctgaaacaaatgaatccgaacatttatgaagctgccctcgatttgggagctacacctatgcaggctttgcggaaagtaatcattccggagattcgtccgggaatgatcagtggctttatgcttgcactgacactttcaatcgatgattttgccgtaactgtatttaccatcggtaatcaagggctggaaacgctttccacctatatctatgccgatgcccgcaagggaggtctgactcccgagctccgcccgttgtccgccattatttttgtggtggtactggctttactgatagtaattaattaccgtgccggaaaaacgaagaagaaagaatcatgaacatgtactgctacgtaaataaaatgaaaagaatagttgctgttaacttgtttttgctggtgctggctggttttctgagcggttgctacaattccggcgaaccacgggagagagttcttaagatctataactgggcagattatataggagaaggtgtactcgaagatttccaggcgtactataaagaacagacaggtgaagatatacgcatcgtctatcagacattcgacatcaacgagatcatgttgacgaaaatagaaaagggacatgaggattttgatgtggtttgtccttcggaatatatcattgagagaatgctgaaaaagcatctgttgttgcctattgacaccactttcgcccattcccctaattacatgaataatgtgtcaccatttattcgcgaacagattaataaactgagtcagccgggtgaagaagcaagccgttacgctgtctgttatatgtgggggaccgcaggtattctttataaccgggcatacgttcccgattccgacgctttctcctgggaatgtctttgggataagaaatatgcaggaaagattctgatgaaagacagctaccgtgatgcttacggaacagccgttatctatgcccatgccaaagagctggaagaaggaacggtgtcggtggaagacctgatgaatgattactcaccacgtgctatggagatagctgaaaagtatctgaaagccatgaaaccgaatattgccggttgggaagcggacttcggtaaggagatgatgacgaagaataaagcatggctgaatatgacctggagtggcgatgcgatatgggcgattgaagaggcgaatgcggtaggagtggaccttgactacgtggttccgaaagaaggaagtaatatctggtatgatggctgggtgattcctaaatatgcgaagaatccggtggctgccagctactttatcaactttatgtgccgtccggacattgcgttgcgtaatatggatttctgtggatatgtgagttctatcgctacaccggagattctggaagagaaagtggatacgactctggattattatgcggatttaagttatttcttcggtccggatgccgacagcatacagattgacaagattcaatatcccgaccgtaaggtagtggaacgctgcgctatgattcgtgacttcggagataaaaccaaagaggtactggatatctggtcacgcatcaaaggtgacaatctgggggtaggtattactattctgatttttgttgtcgtagctttgatgagcggatggatgatttataagagatggcaacgctacagccgtcggaaacaacaaaatcgcagaagcagaagaaagagaaaaaagaatgtgaagcggtaagttaaaaacacccggtaataagcggtggatgataaacgaatgatacggttaaatccgggcatcgtttgtcatccaccgcttttttatcctgctcttttcatagaacggatgatgtctttcgtctctttatctacacgcagagattcaatgattttctgcaatgatttattgtatgtccagttatccagtttgctctgcttcagatatttcatcgtcttatccggaaatttaatgaaacagattgatatcatccatgccattgccatacgtgcataataggcttcatgagtgaataaatcggcatattctagcaatgaatcgatatgatcctcatctacataatgaaacagcatcacaattccgaaccggatttcatattcttcttttgacttcagataaggctggataaactgccatactgtttctttcccttttcctaccgctgtctttttcagctcacctgagaaaatatcgcatacggcccagttgttgatacgcgggacgaagaggcgaatatagtggattcgttcttccagctccattttagcgagtccgataatcattccctgtagcattgtctcttcataatactgtgtatcggttgcttcaacgaatgtccgccagtcttctttcttggcgagccctttagccattatccggagttgcgggatgcgtacaccgagaatattattggcaccgggaattaaagaggagtgaaattccctgtatgtagggtcttccaacgttttcagttctttacggacgctttctgttgttgtcattggctgtagatttattattgatgcaaatatatgaaaaagagtgcgtcttctttcgcagacacactctcttttacattttattctgtaaataattaaacagtcaccttatttcttggtcatatcaaaagtaaaggtagttgccggaaatttatcaaaccgttcttcatttactgtaacttctgttgcctgaatagcaaacttcagtttctgaccttcataagcataactgcctttctcgtcagctttgattgtcacttttacggtgagtttaggagtttcttcttccccttcagtttttcttatgggttgtggttccattgcgatttccaataccaagggttcaggtgacatttgaagtaagatgttgtctttattatcattgaaagctgcctgataagggattttgtattctacatctcctaccgctttgatgatggcttcggctgcgtccggatcttcgataatgcttttgatcagatcctctaccgggaatttgctgattaatatatgattatcttttaattcggcatttacggtgactccgtctccagcttcattctctgcattttccaaaggagcgatagaggttgtctgcattttgccggaataggtgccttctacatctttgagagaatataccggaatattttcatcatcatcactgctacaagaagtaaagatactagtcatccccaatgccattaccaataaaacaaaacgacttaagcaacatacttttttcattttagttaaagttttcatacttgttaaacaaattagattattaattctcaaaattaaggtgtacgtacatagagtaaataccggaaataacggaatactgcatcaagcaaatgaaaaagaaaaaggtactccagtcgatttctccgtaaataccacgctggagtacctccggacatatttttatatgttcgttttattccgactattttttcttgatagattctttaggggtaattccgaagtattctttatatctgttgcggaagttttttacatctttcaatccgatcatttccggtatggtgccgacaggatatttcccactttctaacaattcatgtgccttctccattcgaatagcttcaataaagacagtgggagcttcaccggtcagcgttttccacctgttgtagaatttagttctgctcattcttaagtgtgaagcaattgcatcaatagtcaggtcttcgtgctctattcgttccagaatataatctttcacttcattgatcaatgagtttctagccccctcagtagcttcctttatgatttctactggttgtacttgcagaaaatgttctccgaatactttgtgcaggaatgcttttctaagaaggcggctatttctgataagaacagcaatctctatttttaaatcctccacatgaaagggggtatgcataaatgtatctgccaatgacgcttcccttttactgcgttggtcggcatctatgtgcgatccgtaaaggatgactggtataatagatgtttctttagacgtcttcagtcttgaagaaagttcatcaccgcccattccgttgagcactgtatcgcatattaccagatccggatgttcatttttgatatatcccaatgcgtccgctccgttttcaaaacctctgactatgtattcctctgataaacaggtctccagataggatctgaattcttcgttactgtcgaccataatcacgactggtctggatgaatttcttttctgtgaacttttgtggaataaggcatcaatcttttcttcctctatattcttctctatatgaaccaaactgcgttcggatacattttcataagagggttttacaggaaaacgtaatgtgatcgtatgacatgaattattgattaatatttctccattgcatatttctgtcagttttttgcataaagcactttttgcaaagtaatatttaggttctgttttttgtttaataagatgtttaccggagcatttatagcatttgattaggttttcatttccagtataactcgctttaattatccaatatttgttgcataaagatgcgtgtataataactttttttgaatattctgtatgatctattatattctttatgaatttctctattacgggagatattttactttgatctatccacacgcttgcatatttgaattctgtttggatttctaatttaatatgtctgtttgctgcgtgatctttcagagaagatattttatttttaaggaaatttcctaattcatgttccgtaatattcatttttttggaatgagcggctatttgcttcaggtccattaatctggttaaatgatcattaaggcaatctatgttgcggatagccagtgacagctcttttttgatattgtctggacagttattactataggttgactttaaaggcgtatgaagcaatgtgattggggtgcgaatgtttcggaaggaatccatgaagtactgattttcttcttttaagaaagcaatttctttccgcatggcaaaagaatgagacaagaaccaatacaataaaagtattcctgctgttgaaaataaaattggaaataattcactttgggtggttgtaactgcgataatagaagtgtataatgacgttataattaaatatttcatattaatctgtttttttagtaacgtcacttggtgaaattgatctattcctcttgttcgggtttgaagcaaggaaaaatgcacagtattatggtctcatgattgtatatcaataagttcaaataacatgatctcaaaattatttgttctttgaaggctgatatcgggaatgcgtagtatgtagagttttaattctaatgtttgaacccttttgaaaggaatagggcaaatctcctccaagtaacaataattaatttgattattttttattaaacataaatgttaaatatattgtaagtaatgcgggctgctcaggaggtgcccgtgcttttggttgggtacttttggaataacttccatttagtaccaattcagattctctcatttttgggtttttggataatatatacgtatttttttataatataatattgcttgttcttatgaggtaaatatacgtcatagttataaaaaattgatataatatctgattaaaaatagagacttgttactttttgtatgatgtttgcgataaaatgtattgaaaacttgtatatttttaatacaatgttatatttattgttcgtggaaaatgataatgcttgcttattgaaggttctgtctattattaatttatgtttaataaaatcataattagatcaaaacagtcatggaattctttgtttttattccagatttgggagattgatacgtagatttatagtatggttctatgaagtatgcttaataaattagtataatgctatatatcttttcctatatttatcagattggtttgaagcattctaccatatgaattaataaattctcgccagctattagctgtttgttgcttatgttttattctgttgcacttgtgtagctacagggatgcataactgtagctgacttgttacacaagtctgcctgtctgattactcgattgtaactttattgtttctttatgattggataggggggagtgaaaaaagtgcagttttcttctatgaaaaagtgaaaagtatatagatgatttttgtaaacttgtagaaaaaagaactgttttgggacttaaagtgttgattagtaatgctgtgacatttttgtttttccccttataataattagattagatacaaaaatgtcacagcattcatctgattatcctcggttgctacttctcttcttttttgcccgtaactttccctccagttaattatatgagcgttgggagagtgagtagcttccgaaggatatattatctaataaatgttatatgagtaattcttcacatgtttccttcactaaaaaggaacatgtgaagaaatacattactctctcactttaaactacttctccctctttcaacaaaagagggagaagtgtattttaatacttcatcaagtgtgatgctttaaagcctttgattaataattctttggataagaattaccgtcataagtacaagtagacttgaaagctccttttgcaacaccattcaatacgcttacaatgttgttggctctaaggtcatagtaaccaatagcaccaaaacctttatttgcaacttgtgttgcataaagttgggcactactagcagatggggtactgttaaggttgatggttaatggtgcccatttactgttcggcataccaaaatctgtaccccatgatggatagttgaagaatgcgtaaatgccataatcaatatagctattaactcctgtaagctcacttgtgtagccataattgaatacagtaatcgtcttacctggcattttgttatggagcgcagtaatcaaattagagaaagaacctgtacttccagatggataaccatttctaccgtattcagcccattcgtcgtcaaagtctacaccatctaatccatattgactaacagcattggcaacggcggtagcaaactgttcagtctgagctgaattcatgtttgcgaatccgagtcctgtatggtcacctaatagaccgagtaaaactttgatacctttgtcttgaagaggcttaatcagagtgtctttgtggtccaaaatgtactgtacatttggattgttatataaagtagcgtctgagcctacacctcttatgttggcagcgaacagaattacataatcgaaaaatggagcatcatccataatatatgaccctgcattaagaggattgatatcatttacttcaatataaacgatgtttttaatacctgtggccgaacgggtgactacttcagattgattattatctgattggtttactggcatttcttcttgtgagcatgcgcaaaatgcaaatatagcgatagatgacgctaaaattttatacaagtttttcataatgtaaattttaaaattgatttaatgatttttcttttcttataatcaatgcggaagacatgtctttggcattgataggatacgtgtttggtggaagttcctccttcatagtctgatttttatgcgtaaatattctgcatctcctttctcagtttgtccatattcacagatgctttataaatatgaatgttatatcttaataatctttaggcatgagaagatcatgaatgttgaggtattgattatttggagagttaatacctgttacaaaatattctttttccatatcacataagttacagatagcaccataagccatataagtcggtgcataagattccgttcctgcactaacatagtctactctatttactacaaatacatgatttattccagcggttatcattagtgagggttgagtaaacatttctatcacttgatctaaaatatttgcttgctcacttgacatatgtatatcagtatttaaagctccccatttttctttgtttaatcctgcaataggacgtgtccatttttcaggagtactccaaggatcaataattgtgttcaattgatcacaccaagcataatctaaaagttctcctaatttcaaattagcgtcattagtgatcccttccggagattcagaagtttgtgtataggttatgatcttgtttcctagcttatctcgtaaagatgctacgaatttgcatagattgtttgagtaattaatgttttcattactttcttcataggaaaaattagcatcatatagattgactccatctaaatgatatatatcaatcacttgttttattctttctacaaatatcatcatttctttttcccccagattggaaaaaccaattccttctcccgctcccttaatggcaaggcaaactttgtggtctaactgttgcaatggaacgatgtacttttcacgtttctttagtacgtatgccagatcatcttttagatataaggatggcaacagattatcgtctgccttgacggtagcgaactgtaggttgattatatcgaatggattgtagtaatctacttctggtgatgaaagagacatagactcaaaatagagtttgttgagcagtagaggattggtgaattcgggatctacccctgctatctgaatgaagtttttctttatagcgttatattcggcaggagccattccccatacattaattatataatataatgttttgcgttcactagacatggccggggaactattgttctcttccactgtcagagggagtacataaataacagaatcttctatggcttcatcatatttgaaggcaatagagacagagtttgactgctgttctcctttctctattgtcatttttccactgttacctaaatctacgtattctgtaggatacagagggtaactcgttccgtgcttcgaattgaagtccagtactttggattcgtctacttttacggtgtaatttcctgtctgtgaagccggttctgttaagctgatgtgaaattgatcgctcaaactggcatggtccatgtttatctgcgggttttccatcgcataattatcgctttgtaatatacccatagaaagacctatacctccggtttcggggaatgtaccggcatcgatagtaagatcgttattttcgcaggcagtcccaataaaacctgccgcaaatgccagaatcagtatatgtttcaatatttgtttcatattttgatttttataagtttctcatttctaatcttccctattcacttgcggaacttctatgccgcttggccatagttcctcattttttacgtcatattcttctttactattgaaatctttccaataacgaacaatgtgtgcatcgttatgatatttggagtaatccttgatatcattgccgcttccttcattgaatttccagtaagcagcgaggtgtgcttcattttccggatcttcaatgtcgtacatgtttttccagatttcctcttgtgtacgtgctacatcccagatacgtgcctcacagacattaccgttaagttgtcggtcgataagccagcggtcattataagaacgtcctatgtagaaaagccagtcaccgtcgcttgcaccgggaaaactttcctgtttgcggttggcaagttttatttcagagaactcgctgttgccatagttagtgcttcggctttgttcttttccattgacgtagaaaataattgttttggtggcaatgtcgtacgttagtgcgagatggtaccattcattttctttcagtaatttggctttgttggcttcggggaactttcctgccggagtctgtatctgcaactgttgacgtgggaagcctgcatcgcctgcccggaaacagaaatattgctcgatgcccatcagactggaaatgtctgtattggcttcgtcgaaattggatatacgggtgattatttcaaaggtgacagccttcaaattgttcagatgagcagcattgccggcaggctctgttccccatttgggtacatagaatccgggaacttcgacgtagcaatagcgtaagtcaacagcggtagtgatggcgctggagcgtttcactatataccagtaggtggttgagccatccaataggcctacaccttgtgcggagttaagagacactgggcagagatatgctttatcaatctccaattctgtcaggttttcgaaataaatatgtaacggagcagaattgattttgcctgcgcgtattgtcatttcgttgctctccaatcggtaatgtttggtcggcaatatatcatagctggtattgtttcgtgagttgtaggcttctacttgtgaagggtcaactgttacgttgactgtaacatcagtaccggcaggatatgccagccgggctgtgaagctcttttcgcgctgaataatcgttttgttgaatgtcatagtctccgatgttttgctttcggctacacttaaatagacaccgttgtcgaagggggcgcttttactataatcggcattgtcgcaagcagtgacagcaagtaacaacatgaaaattgcgaatcgtattttttgctttttcatcttagattcctcctgtgtttattttaaaggtgaagggtttaaagtctgtatggcaccacgtgtctccttataagtgatgttagcgtgcgaatagtctgcagcgacattctgtatcattaagccgccgataggcccgcaatctattacctgtatggcgaagaaaggcacttgtgagacaagcccgtcattattgtccgtagtcattagctccggatcgccggtaatgagcagcttgtccgagggaatacctgcataatagatagcttcattaatcagaagatgtaactggctggcatttttagaggacgtagtattgagtacgtagcgggtgaatacatcccggttcgcttcgggaataaaaagtggattactttccagaaaaaagatttttccattttttgctaacggtgtaatcttgtcaagcagtaactgacgcatctcggctatacttgcattgactgctgcgttattaccaagtccgatgtcaccggtgtaggagattgaggctccgtcaagtccattgtcgttaatggcggataccatttgttctaaagcgggagtcagaagtgttttgatttcttgtcctgaactttctgcattctctttgatactggtcaggttgaaactaaaaagaatctttgttgcaaaattagtctgcaatacaggaatgtcttccagatcggctgaattaagtgttaccgcattttccagaatgacggcatcaatgctatccggcatcgaacgaagaaagtctttttctccgtctccgctatgtccattgtcgaagcgtacacatacggcatagtgtttgcgacttttatagttgcgaacagcttgtgtgtaacgggcatatagttcagggttctgaccatcgggggtagttactccgtagtccacctgttccgtttcggtccaatcgtcacacgatatccatagacagcctgcaccaatcgtgagagtgacgacggtaaggaaactgaatataaggtttttatttttcatattatcttagtttttaaagattcttacttgtttgctttacgatcccaccatacatgggtaccaccggtatctcccccctgattattactactttcctttatcaatacattaatggcattgttaaggtggaaagaattctgggtgtattcttcgttgggatacatgagtcggcgcatgccggcttcggtactaacattgcggcctttgttcacgacaacaggcaataatttgggatatccggtacgcctgtgttcactccatgattcaatgccgttggggaaaagtgcaatccacttttgggtaatgatacgttccaaattctcttcgaatgcctgttctcccatttcattccattttactgtaatgttggcggggctacctgtgctatacgaacctagcgggtcagtatagccacttggagaggctattgaattcaggtagtcttccgctccgctggctccatgttcttcaaaagaaagcttaacccctgtttcgtagaaatctttggcttcaccgcccatattccatttgcgtaatgctccttcggctcgcaggaatgctacttcggaggcagtcatccatacataaggatcgctggcggtcatcaaacgattggagtacgatgttatcatgtcgtcatcagaaaatggtgaatttatgccgatacgcatgccgtaataaccttcctggtcgttattcttcaccttggtaaaatatttatcccgacgtgggtctgcataaccattcatgtaacagatgatatcggctcctacacgatagtctttccaatcgttgaagcagagtgctgagcgattttctgctacatggaataaggcattgtcgtcgttcttttcgatcactcctgccgttacggctttctcggcaatgctttgggcttcggcagccatatcggtgtagcataggcgcatagccatgcgtagttgtagtgaatggagaaaaaggcgccattgttgtagttttccgtagtagacatcatccagcttttcaaatccgctattgccttctgtcatgttgtcttcaagtgcctgatcggcttcttcaagttcttgaaacatacgcatgtagacatctttctgtgaatcgtaagccgcattcagtccatcgctttcagaaccttctccggatactaacactttgctataggggatagggccgtaaatgtccgtcacgcgttgcatgatagttactcgtagcagtttggctaatgcaagggctacaggggcatcttcatgttgtaaaacggcataatatttaggatatgtttctgatataacatctgtaaatggtgccttcaaccagtcggttttaggattataggtagagtatttctccagccatccggtacgtgtttcaccgaaatatcctgcataagaaccaccacacatggcttccatgaattggtaaagatgctcttgtgcaggtattactaagccttgcaggcctctgatagtggagccgaggtcgtagttttcacggccgatttcttcgctgtccacttcgtatttattacggttcatgtccgtatccatgcaacttcccaaaggtagaagcaggcaggctgaacatgctgctatcagcatatatcgcaggtttttcataaatttcatggttttagaagttaaacttaacattaaacccgatgttgcgggtgctcggcatcatgaagtaatctatcccttgataatagttgctggtagtagcgactgattcgggatcgaaaggtgctttgcaataaatcatccagagattacgtcctaccaaagacacgttgatatcacatatgtttttcaaccaacggcggggaatagtatatccgatatgtgcttcttgcaggcgaatattagtcgcgctgtaagtatagtattgcgggagtccgctggaactaccaattgtctcgtaccattgctgggcattgatcatagtgcgtccgttgataactacaccacctgcgtcgcgggcttttgcactggcttcagatactccgtattggtcgagagctgcttgcgtggcagaataaacgatacctcccaaccggcaggaaagcaggaagccggcagaaacacctttgtatgtgaactcgttactgaaagcaaagttggctttaggtaacacgcttcccaatttgatcggttctacgttggcatctttggccaaagcaccattggcgtccatctcaatataacctttgtcattacgtacaaggtcggctttagagtagaggtcgcccaaagttccgccttctttcaagatgaaacgtgaatagcccaagccattcatttcaagttcgggtatattgagtatcttgcctgtctcggggtgatggaagtcttttactaattcaataatcttgtttttattccatgagaaagtaaaattgctattccagccaaattcattccagcggtgtccgtagctcaacattccttccatacccatattgcgaacgtaacctgtttgaacgtagaatttggagtatccgaaggaagcggatattttggggtcgaaggtttggttataagtattggcatagtagaatgaagcacttaggcgaaggtctttgaagaaagtggcgtctaagccggcttcccatgaatccgtacgttccggataaagcttaccgataggataatgtgttttgggtagccatcctaatatcgtggtatcatatttataagttgggatagtcaggaatcgagggtagggcatacctacggaactgaatgatccgcgtactttcaaataatcaatccattcggggagcttgaccatttcgctgatcacgccggaaagtccgacggagggatagaagaaagaggtttgtgacgaacccagtaattgtgaagcccagtcgttacgtcctgttaaagtaagatagagcatactcttccatcccacttccgcacttgcaaatatggattgggtcatttcttcccatccttcttgtgtggcgcgtttctttgtgttatcaaggtcgaatacgttgaatacattaggtattcctttttcctgtatcggaccgttgtagcctagcatatcatagctgttgtcgcttaatgatgtaccaatattggctacgatagtgaagtcgcccactctcttgttaatatttacaagaaagtcagcgtacgtctggctgtttccactcttttctatgccgtagtatccttgttcgctaccttcggtaagtgtagtgatggtacttgcatagtatttttgctcatacgtgttgtttgaattatctatgcggatgcgtcctgataaacttagccagtcgagtacgtcgtaagttaatcctgcagagagcatataacgttttttactgttttcacgtagattacgataggctatccaataaggattctgcatgcggaggtcaccttcgcccgatggccagaactgttcgttgattttgcgagcttcgttgtagcgttcaaagaccttgactgtagagaaattatcaccacgcggataaaggtaagcaggaactaaaggattggaatactgtccctgattagtcatattacggtcgttttgcaggatgtagctggctcctacgtctagtttcatcttgtcattgaggaaacttgtagtgttgcggaaagtaaaattatatctgttatacctattgttgggaatcattccgtcggagttcagcgcagcggcagagaagaaagtctggttcttttccgtaccggtggataaagtgactgaattgttgtaaacagctcctgtttttagaaagtcgttggggtcgtagccaggactgtttcccatcttcggtccccagctccatacggtggaaccgtcagatttaccgttacttcctgtcccgtaacggttttgaaacttaggcattacgaatggtttcaaccagtcgatgccggtagaaacactggcctgtaatttccctattttccctttttttgtagtgacaataatagctccatttgcagcattgctaccataaagggcggctgcggctgctcccgtaagaacggacagactttcgatgtcatccggattgaggtcggcaatactttccgtctctccttttgaaccaaattctgtgctgccaccacctccgaagttatacataggtataccgtcgattacataaagtgcattattactcttttcgatggattttgtaccgcgcatcactactttgctggcaccgccgacaccggaagaactgctattgataatgacacctgctaccttgccactcaagctgttgacgaagttggcgtctttgattgtagtcaattgatcgctcttgacttgttgtacattgtaacttaacgctttttgttcgcgtttgatacctaaagcggtgactaccacttcgttcagttgtttagtatcacttgccaatcttatttcgtagatattcttatctgttatttttacagtttgaggtgtatatcccacgtaagtgaagcttaatgtgctgccttgaggagccattatattgaaattaccatcaatgtcggtgattgcaccttcagagcttccttctactttaatattcactccgatcagtggctcattattttcatcgattactattccacttactttttttgtaggagtttctttaagtttcttgtcgggaataatcatgatatacttatctttgaactgataagtaaatccacttccccgaaggatttgcgaaagggcatattcaagtgtcgctgcttttaggtcaagatttaaaacaggcttgtttttcagttgcgaatcattgtatccgacagaataatcggattgtttttctatttccttaagtgcctcgataacagatatatttttcttctgaatcgtgatcttggcactattttgtgcaaaggagggtgtttgcatcatcaacaaacagaaaaaaagtaaaaaacttcttccctttgcggtttgatctactataaattcataaatttgtagcattttcttagtattaggttattaactaaattatttcacggtaattgaatagagtaaaactctaatattgagaattttgatttcatatccgggatagagttagggctccgttccggatacttttttgcatgagtctttagtggttaaaaaggttattatattgttgtttttttactgtttttcttttgggatgatacccgttacttggggattaagtaacagcggtctccttttatcttatagtccatttgacctactacatttactatcacatccattacctcagatagtggtgcctggtctttaaacctgaaactgtatctgtcgtctttcagcgttttgagctgatactcgaatgtataaggatatttacgttcaaggattgtgatgatatctttgacggacatttctctgaacacaagttctccacgttgccaggcggtaacttctttcatgtccggatggtccaggctatggtaatgagtatttttgttataagccaactgctcattcggttttagaatcacctgcgattttaaatcattgtattctaccaatacgcttcctgaaatcaatgtggctgccaacaccggattttccggataagctgaaatgttgaactccgtacccaaagctgtcacctgaaaatcattggatttgacgatgaacggatgtttcttatccggtttgactttaaagttggcttcgccgattaaaaatacgctacggtttttcccggtaaagttttgcggatataaaagtgtactttgtgagttcagctgtacctgagttccatcgggtaaagtgagagtccttatttcagcagtaggaatatattgttgaataaggttctcttctgcatctttaccgatggtagaaaggtaaaccgaagatgcggccactataaagaaaaccgcagcgacagcctgccacatacgaatcggtcggattgttctttttcgttgtatgggaggtattccggcattctttttcaaaagttcataagactcctgcatatcggttgcggttccccgtttatgagcctcatcccataatttttgtaatgcttcgtctttttcggaagtatgctcttcatctaccagccacttgtagaagtcttgctgagtagattccggatagtcatttccggtgaataatgttattattttctgaaagtaattcttcatattgaggtattaatgttataactgttatattaatacttcaattaactaaggcagcttacttaagggagtagcagaaaaaatgcaaaaaagatgatttttttcatttcaagcagagttaagtagatatgatgttccactgttcgtctcgaaatatttagtttctcggctatttcaagattgctcatatgcttgaaacgactcatttcgaaaatcattctgcgttgttccgggagacgttcgagaactaatttgatgattagttgcgcctctttataatagatggggttgagtgtatcttctgattggaaaagttcgtcgatgagagttttttctataattttctcctgataagccaattctacttttttgtgtttgataaaattgagagttgtacttttagtaagagtatagatataaggagtcggattaggaacttctgcccataattcaggcttagtccatagtttagtgaaaacatcttgggtaatatccttcgcgtcttcttcggatttaagcagcattagggcgaaatatttcactactgaataatacttcgtgaatattgtttcgaattgttgcgctaaaagtctttcgtcttgatctggggtcatcgggttaacagattattgaaatcgaaagacaaatgtaaacaaattaaattaagatacgaagaaaaaaggaatagtttataaaaaagaaaaaagatagtgacaccatccggtccggatagtgtcactatatgagtgggatgctgacactatcgcaacaggatagtgtcactatcttaaagttagtttttaccagttccttttcactgtacggtagccataaccgatgattaccaggaaacaaatgaatggcaaaatgaatgatacattgacagccggcatggaagctatctctttcatgtcaataatgcttgcttgcaagggaggaagtatggaacctcccaaaatggccataatcagaccggctgccccgaacttggcatcgtctcccatacctttcaatgcaattccgtaaatggtagggaacatcaaagacatacaggcggaaactgctaccagacaatacagtccgaagatattctgaaggaagatcgttcctaatgtgaaaatgcctccgaagatggcaagaatcatgagcaacttccctgcattgagatagcgcagaatgaaagtacagataaagcggctgatacagaaaataaccatcgctacgatattgtattgctgggacagaacttccgcacttttttcatccatgccatattccggtgacataaacaggcgtgtaccatactgaatgataaaggtccagcacataatctgaacacccacatagaagaattgtgctattacaccttcccgatagcgtgtctgggtgaaaatacgttttagcgtaggaaagaaatctattttgtgattctgatctccattcttgggcatttttacaaatcgtatcagaagcagcatcgccagaataacgagtccgatagtgagataaggagctatcaatacggcaagatcgctttccttgatggcctgaaactcactgtcgttcagtaaagcgcgttcatcagtgcccatcgggtgcagtttagcctgaataaattgcatcgccacgtacattccgagcagcgatcccattggattgaaagactgggcgaggttcagacgtcttgtagctgtctcttccgttcccatagaaagtatataggggttgcaactggtttccagaaaggagagtccgcaggtcagaataaagtaagcgatcagaaacgggtaatactctcctgtcatcttggcgggaaagaataagaaggctccgaaagcatacaggccgagtcctaacaatactccggctttataagagaatttgcggatgaacatggcggcagggaaagccatggcaaaatatccaccgtaaaaggctacctgaaccagtgccccgtcggtagcgctcatccggaaaattttggagaatgcctttaccattgggttggtaatatcgttcgcaaatccccacagtgcaaagcaggaggtaataagtatgaatggaataagatagctgacgccatcctttgagataatagactgcttagtgtgtttcatggtaatttcttgttattttaggtattatataaatggaacattctctccatgggtctccatttctcagcggaactcattcccggagcggcctgctggaggatggacatgtattcttcccattcttgttgccgggggagagtattcagacgtgccatggctgtgtcccagtcaaagtcgacgggtgtttcgacgatcatgaacaaacgggtgccgagaatgtaaatttccatctcaaggataccaacttcatggattcctgcaaggatttcgggccaaacttctgcctggctgtgtcttttccgatattcagctattaactccggtgaatcccgtagatcaagagtctggcaatatcgcttgacagggacgttgtaggtttttacttgatagccagtttgaggtgtttccatatctttcttatttttcagggtaatatacttgtggtgtaacactgcggcttactacttctctgatttcccggaggctggatatttctcctttcgccattgcctgagtcaggatattccccattgctgtggcttctaccggtccggcataaacagggatgccgagtgcgttggcagtaagttggttgagcagtttattttgtgagcctcctccgataatgtttagccggtgaatcggagaggggagacaacgattgagctgtgctaccgcctcgcgatatttgaaggccagtgactgtagtacgcatttgaccatttctgccttgtttccgggaactttaagtgaatgattccggcagtagttcagaagggctgtttccatattttcggggttcatgaactctgcatcgtccacaggaataatcgtgtcaatttctgcgtccgcagcttgcggaagaatcgtatcataactttgttcttcgccacgtagcttccattcgctcatcaagcgttgcagaatccacagtccggtaatgttttgcaggaatcggatgtgaccacctacgcctccttcattggtaaattgagccaatctcgcttcttccgtcaatatgggttcatccacttcgactcccaacaatgaccaggtgccagaactgagaaaggctacttgaccttcggttgccggaacggcagcaacggcactggctgtgtcatgcgagccgacagcaataatgtcgacaggacctaatcctgtttcacggcctatctcttctttaagtgttcctctgacagttcccggcagaataatttctccgaataagtgttcggggagtcccaaagtacggatggtatccatcgaccagtttcgttggcgtgcatcgagcagttcggaggtggaagctatgcaatattcattattggctactcccgtcaggtaatagctgaagaggtcgggcataaagagaagccgctgtgcaacttctagcagtacgtcctgattctgttgcatgctgtaaagctgaaacagcgtattgataggcattacttgtatgcctgtgcaggcgtaatgcttttgtgcatccagtatttgaaataccttgtccggcattccgtctgttcgggcatcccgatagcagacggggttgcccagtaaatttccttttttgtcaatcaggccgaagtctactccccaggtatctatgccgattcctttgacatgatatcccttttgtgcagcaagtttcagtccggttttcatatcttcgaacagggcgggaaagtcccagtaaacatgattcccgagtttaacttgccggttggtaaagcggtgtatttcttctaattccagctttccctggagaagggagccggcgatgacccgaccgcttcctcctccaaagtctactgccaaatatgtgttttttgtggtatctttcatggtattcccggatacttatttggttttctttcctaatacgtatatttccaggtcttctatttcttccggtgtcagtacggagtaatcgccgccggactgaactatgatgcggcaagccatttcgaagaaggtagcccgttcgtaaacttggtcgaagtcttttccgcatactacttgtccgtgattggtcagtaagacggaattatgcttcagcattgcttctactaccgctttggctaattcgggagatcccggccgatagtaaggaattacgggaatttccgacccgacatgacaaggtatttctgccgttacgttgaaatttgtcggtttgtttttcatgcaagagatggcagtggcatattccgactggaaatggagtactacatttacatccggccgttcgcggagaacgccaagatggaatgtgctttccatagatggttttacgccattcgtcggtgtaccgctggctatattacagatagatactttttctttggcaagggtagggacccatgaacctgtacccgaaatcagtgcttcttctccgattctccaggaaagattaccgctgctgcaaagcattaattttgcgtctccgtagcggtgtgcctgtgccagaaacagttcgatgtgttcgtcagttatcatagtgtttttatttaagccgtcatatagtggaagcttgtgtttgaagactgcttccactatgatacggcaaagttaaattattaaattaaataggacgaaagattcttgtttatttatagataggaccgtaagttgtacaagctctgtaatctgctccttctttgtccataccgaatgcgttccatgcagccggacggaaaatttcgttttcatctacattgtgcatgcaaacagggatacgaagcatagaggcaagcgtaatcaggtcttgtccgatgtgaccgtagctgatggctccgtggttagcgccccagttgttcattacagaatatacatccttgaaagcggatttatcacacagacgaggaacgaaccacgtagtcggccatgtcgggtcggtacgcatattcagtttctgatggatttccggatcaatctcaacggtccatccttctgcgatttgcaagacagggcccaagcctttgatcaggttcagacgcatcatagtaacaggcattccaccttttgaaagaaagttggacgagaagccgccgccacggaagtaatcgcggtctgccggataccaggtcgttgctttgaggcagttttctacgtctgcgtcagtcagattccatggttctttcatgacaggatttccttctgcgtctaatgactggccggaaccgtcgagtgttgttgcaccggagttgatcaggtggatgataccgttggctgccaagccggtcagttctttaccggttacacgtttcacggcttcagggctccaatacgtacgtacatcagagaatatttgtgcacgattggtcagcaagtgtccgaacagcatggctacaccgttacaagcatcgttttcggtagccactacgaatgcttcacgaataccgttccagtcgaaagaagtgttgagcaatgcttccggatagtcaccgttaggataaaagtctgtccattggcgttgtccctggaagccggcagcgatagcattgtgtcccaaagcttcttccttgaatcccatttctttcagtttcgggtttccggtcatcaggtcacgcatgatgatcatcatcttcacgacaaattcccagtcagcatctttttgttcgcggtttttgcgtttctccgggcggttcttgaagtcttctccttcatttactttgcagtatttttcagtccatgccattgctttggcatattcttcgtggtcatagataccttcttccatgcggcggatgatttccgtcaggtcaattgactcattgcgcattcccagatattcctggaagaagtcggggttgacgatagagccggcgatacccattgatacactacccattgacagataagatttgcctctcatcgttgctactgcctgtgcggcacgtgcaaaacgaataattttttccgctacgtcttcaggaattgtattatcgtcaaggtcttgtacgtcgcgtccgtagataccgaatgcagggagtcctttttgtgcatgacctgccaatacggctgcaaggtatactgctcccggacgctcggttccgttgaagccccagacagctttcggataatgaggattcatatccattgtttccgcaccatagcaccagcaggaagtaacggtgatagtggaccctacgccttctctttcgaatttctctgcacaagcagcgctttcggctacacgaccgattgtactgtcggcaattacacactctacaggacttccgtcgccgtttttcagattattgctgattaactcagctactgctttggcaaggttcattgtcttttcttcaaggctttcacgaacgccgccctggcgaccgtcgatagtgggacgaatcccgattttcggatactttttcatggtttcttaatttttttgttatttagtggttaatatctgtgctgaactgtgctgtaaatacggcaaaaaaaatcacagggactttcggagtcttacttcggtaggcaggtacttttgtatcgggacattgttcaggacaaagtttgccgcttcatttcccatcatctcccaatcaatactcaatgaagtaattccttcgtcgatcacttcgtaggaaggaatatcattgtatgccaacagaccgaaatcttttccgcatttcagtccttccaatcttccttgttttacaaccttcactacatcttgttgcttgatggctatgtagactactcctttgcgtacagtcagattctcgatatcttcctgaatttcgcataaaaatccttgttcctcacaaaaacgggtaaaatactctttactgctttggggatgcttcagatttttagagaataacagaaccagttgtggatagtgccgtagtctctccttcagcatgagtaatgcctgatagaaagcttcatcaaaatcctggcagatataagaatacttttctttctcgaatttaccgaagtcaagaagcaataattttgttggatgaatcttattgagaaccatactgaatttctcattatcgaaattcatcactatgtatttattatattttccgacagattcgcggataatagtattgaaaagccgttcattatattgatgaaacagcaagtctactttgtaattaataggcagatgtttgacgaaactgttgtaaagggcttctttaaaaggagtgtactggtcgagcaggagcaggacgttggtcacctgactggttacataatatccttttcccggagttgaatcgatcagtccccgttcgcgcaaatcaagaaaagccttgaaaacggtatcgcgtgatactccatattctgcacttaactgattgatggaaggcaaagaatctccttcacgaaattttttcatggaaatcgcctggcttaatgtatccgctaattgcgtaaccttgctggactgttgaccgaatgttttctttttatcagttcgtctcatactgttataagataaatgactgtgctgagctatgctgttgcaaagaaaggaaatttattcagaagtagagaactattttaatatgttctatagcaggaaataaaaaaatccccttcggcgaaccgaagaggatttatagctttttccaaatttcttgttaggaacctgccgaaatttattcagcagcagcttctgttgcagcagcttcttcagccggagcttcagttgcttcttctgcaggtgcttcagcagcagctttttcagcagcttcagcagctttcttttcagcgagtgcttttgctttcacttcgttgatcttcttttctgcttccagacgtgctttagcttcagctttcttttcttcgtcttgtttagttttcaaagcagccagacctgactgtttgttgttcttccaagcttcgaatttagcttctgcttctgcttctccgaatgcgccttttgcaacaccgccaagaagatgtttcttcatgtaaacaccttcacgagaaaggatattacgtacagtgtcacttggttgtgcacctttcagtacccatgccaatgcagcgtcgaaattcaaatctactgtagcaggattggtgttcgggttgtaagtaccaatcttctcaataaatttaccatcacgtggtgctctgctgtctgcaattacaattgaataaaacgcgtaacttttacgtccgtgtctttgcaatctgattctagttgccatttttaataattgtttttaattaatgatttgaattatgctattaactcgtaatagcgggcgcaaagatacagcttttcttttgattgacaaatatttcctttctttttcttatgaatacctcctcggatatcggaacaggatagcgagcagggcacagactcccatcgtaaacggataatagagattgccgataatactgataggagagatgttggccaatccggcagcgatcagcatttgtgccccatagggtatgatgccttgtatcagacaggagaatgtatctaggatactggctgtttttctccggtcgagatggaatctctttgcaatatcctttgcaatcggccctgtggtgatgatggcaatcgtattgttggcagtgcataggttggcgatacttaccagagcggcgatactcagttccgcaccacgcttgctgttgacgtgacgggtcagttttttgatgatgaaatcgatacctccgttatagcggattgtttcgagcataccgcctgccagtaatgtgatgatgatcaattcacccatgcctgtgatacccgtacccattgccccaaaccaatcgaatacgccaaaactcccggtagctatgccgatgataccgctggtcaggatacctattattaataccagcatcacgttcattccggcaatggctgttcccagtactattatataaggtatgacttttatccattcgatagtctgtacttgcgcgggtgcagtgatggatagtccttgaaaaatatagattcccagtacgataatcgctgccggaactacaatcatggaatttacccgaaacttatcacgcatcacgcattcctgagttttggttgaggcaatggtagtatcggatataaacgacaggttatctccaaagaaagaacctccgacaacgactgctaccataaacggaagggcgatctctgtcttttcagccagaccgacagcaaccggagtaagggctacaatcgtccctacactggttccgatggataatgagataaaacaggcggcaatgaatatcccggccaatagcagattatcagggaggatatgcagtgtcagattgacggttgcatcaatagctcccatctgcttggcgctttgtgcgaaagctccggcaaggatgaatatccatatcatcagaagaatattcttgttggcggctcctacggagaactggtagattcgctggtcgagcttcaatccccgcgtaatggcaattgcgtaacaggaagacacgaggaaagccacagtgataggtactttataaaagtcattaacaagaatggaagttaccagataaaggcagagaaagacgagtaacggactcagtgcccaccagctgccatgacgttctatatgtattttttcttcagtcataaattgatattgtggtatatattcgaactgcaaagatagtaaggaaacacataagtacgataaaaggctcaaattttcatcttttctttttccgttttagctctttctttttccgcttcggaaattaaattccggttcttttttcttctttccgttactttcgtgccgttgacaacgtaactaatgtagaatagaatgacaacgactaatttttcattgtgtattttttgtctttgcctgctcacatcgtgtggtaagggtgagaagaaaacaaacgagcctgtacgggtaaaagtggcggaagtggaaatgctggttccttctgcagagcgtgaattttcatttattgccaaaccattcaaggagaccgaactctcttttcgggtgggcggaccgattgaccgtttcgaagtgtatgcggggaattactatcatcggggagatatcatagctgaaattgattcccgtgattttcgtattcgtaaggaacgggcggaagctatttatcatcaggcaaaagctgagtttgagcgaatcaaagtgttgtatgagaaaaacaacctgtctgccagtgcctatgaaaaagcacgtgcagactatacttctgccaaaactgcttatgaaacagccgtaaatgaacttgaagatacgaaacttattgctccttttgacggatatataggggaagtctacattgaaaaatatcaggatgtgaaagcgactcagtctgtcgtttcttttatcgatatcactcagttgaagatagaagcgtatgttactcaggagatcgcatttcaagcgaaggaaatcaaggaagtggggattcgttttgatgttcgtcccgaagcagtatatccggctaaagtgatagaggtttcaaagagtacgacgcgcaataatctttctttcctgatgacggcattgctgcccaacaaacaaggagaatggccggccggtatctcaggaaaaatgttgttgaaccttcctgctacatcatctgttcctgtggtgaccgttccgcaaacggcccttaatcatcgtcccactgaaggagattatgtatggatggtggatcaaacgacaggacaagtcgtgaagagaaaagtcgttttaggcgaattgcttcccaatggaaaagtagaagtgaaagacggattgcaggcaggagataaagtagcggtgagtaaattacgttttctttcggacggaatgcctgtagatattatttctcagaaagaaaaaagggcggttaccgctcaaaagtaagtagaagaatatgaagttggtaaaatatttcttgcagaagaagtcggtgactattctgctgttgatattagtgctgggaggaggattgttttcttatatcaagatggggaaactggaagatgctccgtttactatcaaacaggcattggtgatgactccatatccgggtgcttccccttccgaagtacaatctcaggtgacggatgtattggaggaatcgatacagtcattaggcgaattatattatctgaaaactgaaaatcgggcaggcttatccaagatcacggtgtatgtaaaaaaagaaatccgggcggatgaaatgcagcagttgtgggataaacttcgtcggaaggtcaatgatgtacagtcgaaacttcctgcaggagccggtccttcagtggtgaatgatgatttcggtgatgtgctgggtgtcttctatggtctgacaggtgaaggatattcatatcgggaactggaaaatcaggcgaagcttatcaagaatgtactgctcagggtgaaggatgtggcaaaagtggagatttatggtgtacagtccccaacgattgacgtcattcttaatccttccgttatggcacggagtggaattacgactacggatatttcacgtgccttcgatgcacagaacagggtagtggatgccggagggattgatgccggtgtgaacaggatacggattgaatctaccggtaatttttattctctggatgatatccggaatatgactatcgtatcacgtacaggagagcatttccggctggctgatattgcagagattgaagagagttatcagacgcctccaagtaataaaatgcggattgacggaaaacctgcggtaggtattgctatttctacgatacccacaggaaatgttgtcgatatggcagaggcggtaaaactggagattgaccattttgcagagacaatgcccgaaggttttgaactgcagacgatttatgatcagggttatgaatcggcagtggccaatcaaggatttattctgaacctgatcatatctgtggtaacggtagtagctattctgttgttttttattggattcaagaatggtattttgattggcagcggattggtgttttccatctttgcgactttgattgtgatgctttcacaaggaattgccttgcaacgtatgtcacttgctgccattatcattgctatgggaatgttggtagataatgccattgtggtctccgattcggcattggtcaatatgcagcggggaatgcggaaacgggtagccatattgcgggcttgctcttcaacttcgctgcccttattggcggcgacagtcattgcgattctaacttttttacctatatattattcgccgcatattaccggcgagttactgtcatccttagttgtagttgtcggcgtttcgctgatgttcagttgggtctttgcgctgacgcagactcctttctttattcaggagtttgtccgtcggccaagacccaacgaacttaaggcggctctttttgcaggcaagtattacgataaatttcgttctgcattgaggtgggtgattcgtcaccgatatgcaacgattgggtgtatggtcattatgctggtattgtcggcatggagtttcaagttcattcctaaggtctttgttcccgcattggataagcagtattttacattggatatgtggttgcccgaagggacacggattgaagaaacagataagatggtgatggatatggcggagtatatccgcggacaggaagaaacggaaatggtatctacttatgtaggacggactccgccacgttattacttgtcaaacgtttcctttggacctcaatccaactatgcacaaattttggtgaaatgcaagacttcgaaactttcccgtcagctgcatgcccgtttgcaggactctgtttcgttgaagtttcccgaaccgttgattaaagtaaataagttcgagctaagtccgttgacggaagcggtgatcgaggctcgtttcctcggaccggaccctgctgtactcgattcactggtagggcaggccattgagataatgcgacggaatcctaaagttgcggatgcccggaacgaatggggaaacatgtcgatggttatccgtccggtatatgatccggtgaaggccggagcattagggattacaaaagcttcgatgatggaatcggtgaaatcgattaatgatggtttgcctgtcggtgtctatcgggataatgagaaaaaagttcctgttcttttgaaatcgggtaatgtggatataacggacgcccattctttgggagacttttcgatatggaatggagaaaggtcggctccgctttcacaggtaacggaacggatagagacaacctgggagtttccacaggtgagaacttataaccgtcagttgtcaatggctgcaatgtgtggcgtgaaaccggggcatacgatggcggaagtacatggagaaatccggaaagaaatagagaatatccagcttcccgaaggatatactttcttttgggatgcccagtataaagatcagggtgaggcgatgcaggccattgctaaatatttcccgttggcattccttgcattagtggttatcctggtagggctgttcggtaatttccgtgaaccggttatcattctttgtgtcctgcccctgtctttgataggtattgcggtggggatgctcttgaccggctttgacttcggtttctttccgatagctggttggcttggattgcttggaatgatcatcaagaatgtgattgtactgattgatgaaatcaatgtgcagcatcgtagtggaattgatctgtatacctctattgttgaggctacggtttcccgaacccgtccggtattgatggcggcaaccactaccatcttcggtatggtcccgctattgtttgatgtcgctttcggcggaatggctgcgactattattttcggactgacgttcgctacggggctgaccttgtttgtcacgcctgcattatattcaatgttttataaagtaaaaggaaaataaagatgaaaataaggatatatagcttgttgttatgtggttttgctttgggggctttgtctgcctttgcccagcaaagtcctcttcttgaaaagtaccggactatggcattggattacaatcacgacctgaaagcggcagagaagaatatagctgccagtatggaagtggaaaaatcggcatgggcagatttgaaaccgaaactttccggagcggccaactttcagtatacgggaaatccgttggaattgactctggatgttccttctttaggattgtcaagaacagtggaagggaaacaactgaactatggtggttctctttccattctgcaaccggtctatacagggggacgcgtgctggaatccatccgtatggcacaacatcagcaatcatttgccgccaatcaggcaaaggcattgaatgatgctgtttgctatcagacggatattcaatactggagtgctgtagcccggcaggagattgtgactgttgccgaagattttcgtaactcaatagccgctttggttaaaacaatcaaagaaagggtggaggtggggctggttgatccgcaggacttactgatggcggaagtaaaactgaacgaagcggagtaccagttgctccaggcacaaagtaattttgaaacaggacggatggcattgaattctatgattggtgtccggctggaacatcatacggaactggattcgcagataccggtggtggttgtcgatgattctacatggttgtctaccggtatggcacgtcctgaaattcagatggcttatgaccggattcgtatggccgagagtacgaaaaagttgaatgattcgcagttcaaacctcagttttatgtgggaatagacgggagttactcttctcccggatataatttcaagaaagatctggatcccaattatgctgtttatgcaaaggtctcagttcctatttttgaatggggaaagcgtaaaagtgagaagcgtgcttcttcctttcgggtaggtatggcagaagataatctgaataaagtgatggatcaggttgaactggaaataggagtggcacgtaaagccctgtcacaagctatggaacgggttcgtttgagcgaaagttcactggcgaaggcagaagagaatgaagcgaaagcaatagaacgttataatgaaggaaaggtgtcagtggtggaagtgattgatgcgcaaacctatcggcagacatcgcaggtgaattatgtgcaagccaaagctgcggcacaaggacactattcggagttaataaaagcgcttcacggatatgattgtcgataaaaagcactaactttgtatgaaaagagccaactgtatgaatgtaaagttgaataccttattatatatagcgctgttttcaggattgggtatattctctttcctgttactgataaattatgcaactttctctgatcgggttgctgatatgctacattcagtcagtacactggggttctttatactggcttttaatgtgctgggatatgctaccatcaggttgagctcatggatcgataatcagtatgcgttgaatctgcatcggcgttggaagctggtttcagtctatattatcgtaatggggatgtttcttttgctaaactacggtttaatggtaaccgccaagttgttggcaggagcttcttacccgtttacgtttcccaacggaggctggcggattcttattaccgtatggctggtagagctcgtcatccttggattgttgctggccaatcgctccatgcggaatacgttaagattacaacagaaagcggctgccttgcaaaaagagaataatacggcacgctacactgctctacagaatcagttgaatcctcacttcttgttcaacagcctgaataccttgatttctgagattcgctacaatccggctaatgcggaattgttcacccagcatctttcggatgtgtatcgctatattcttcagtgtcagaatcaacggctgacaacattgcgggaggaactggattttctgaactcttatatttttctgcatagggttcgtttgggcgattgcattcatattgacaaccgtattccgaagacttgtatggaggctcagttgcctccgcttaccattcaattgttagcggagaatgtaatcaaacataatgtcattcatacagggaagccgatgactatcgaacttctttatatggaaaaggaacgggaactgattgtcagaaaccggatacaaactaaaaaaacggtggtgacttccggaatgggacttaagaacctttctgcccgatatatgttgttgtgcaaccgtgacattgtggtagaaaatgaccggaaagagtttaccgtaaaaatacctttgctctatgaataagataaaagcagccatcatagaagatgaaattccggcagcccgtctgctgaaggatacgttattgtctcttcgtcccgattgggagatacagttattgcccggtaatattgaagaggcagtagaatggttcgggcagcatcctcatccggatatcctgtttctggatattcagctaacggatggcaattcttttctttttatagaacaggcgcatccggagagtatgattgtatttactactgcttatgacgaatatgccgtgcgtgctttctcagtgaatagcattgactatcttttgaagccgattcatgaagatcgcctgatgcagaccattcatcgttttgaaggattgacgaaaaattatatccatgatttcaatcaggaaagccggatgctggaaatattgcagcaactttctgctgcacaggagacctccgtttctgtgcagaaaaagtatcgtacccgttttcttatttccggcggcgagaaacttttcaccttacaggtgagtgatatcgcctacttttattcggaaaataagctcacctttgccgtgactcataagaatcgtgagtatctcatcgatctggcattagaccgattgagcgaacaactcgatccggatcactttttccggacgaatcgtcagacattagtctgtattgatgccattcagcgtattgaatcctatttcttaggaaaggcagtcgttcatgtacaaccacccttcaaagataagatagtggtaagtaaagacaagatggcttcattcagaatgtggctgaattattaattgttttgtaatcttccaaaggtgaattgagccccctttttataacaatacgatacgtttttgcataatagctgtcagttgtgctttcaactgacgggcattgataggtttcggcatatatccgtcaaaaccactttccatcacccgttgttcgtccgaagcgtatgcaaaagccgtaatggcgataatcggtactttggcagagtacttgcggatttcttcggctgcttcatacccattcagaacaggcatattgatatccattaatataatttgcggattatgttccttgaacatatttacagcttcctgaccgtcccacgcatgaatcagatgataatcatattttagaatagattcgaacaacttatagttgctttcattatcttcagcaatcagaatgaccagtttatctttttctatggtaatggtttgtacgtctttggggagaggcttttctacagtttccgcttgtttgtaaggcaacgtgaaccaaaatgtagagccgtttccttcttctgattctactccgattttgcctcccatatggtcaacgagtgtctgacagattgagagtcccaatcccgtaccttgcgcaaaggaatttaatttgataaaacgtccgaaaacactttcttgcttatcttggggaatgccgcaacctgtatcagttacatagaagtacaattcatcattttgacgttcatatccaaatcgaatactgccctgaacggtgaatttgatggcattagtcaccaggttaatgattaactgggatagtctgttcttttctatatgcgcaaaacaaggttctgcgggagctacgaattccagttttacagcatccgacttaagtttcaactggcaactgttctccagatctctcattaagtcattgatctcgacattggaatagtgcaggtccagtgttcctgcttctatttttgataaatcgaggatgtcgctgatgagctgcaataataacgtattattgttttcaatgatactgacgtattcttgtttttcctcttcttcctctgtggatgccagtataccggaaaaaccgacgatggcatttaaaggagtacggatttcatgactcatattggcaaggaaggcggacttcaggcgattggactcttcggcacggtctttggcattaatcagttccatctccattttttttcgttcggtgataacgagcgaagaaccgaccaaagtcagtggtttgccattctcatcccgcgtttcaacggcagcctgggcttccacccattctattctatgaaatcctttttgtgtgctgactatgcgatattcttcttttactttttccgaatgaccctctattaagttttgataagcttgttctacccgcttccggtcttctttaaatattttggagaagtattgatgatcgggtactgctaattgctcttcagttatttcttttccttgcgtactaagctctatcggtttgttgatgtcgcataaaatcgttttactccgcaagtcccatttccacggcacgatattagccacgtcaagtgacatggcgagtttgttgttgatggtacttagcttttgttgagccctgtgtagctctgtactgtccagacagaatacatcaatcatattattttgccggtttgctttaagtactatatcatagaaggtatctatttttttgaaatagtaggggaatgttattactttattctctgataaggctatctgggtgaagtgcaggaagtccggcattgattccgggaatatttcactcgccttttttccgacaacttcctctttgcggaaaaagttcttctcgaaatgcgcattcacattgcggtaaatcagttctacgggaataccatttttgtcagcaaccacttcttcctgcatatagagaataggcatgttattgaccagattcttataattggccattgcgtcaatttccttttgctgtgcttttttgatgcaattcagactatggatacgataaaagaatacgattgccagtaatatcataaaggataaggtacccataatgaaatatttgttctgtttccagaatccaggcggtttattcagaaaatgtgtgtttggcggacacatggaaggagagaaccctttgcggagtaatatcgtatagttgataataggtgcgccatccgatggcatataaaagggaatttctctagcctgctttcctgcaagtatttctgaaatagtatgaattaattgctggctgtagtgcttttggttataggtataaccacctatcataccaccgttttcttctgtaatgtcagccatattgagggtgaaaataggagctgtagttgttacgataagtttgtgagcattggagatcaatgaagtgttacctgcaaatgtagttttgtagaaccaggaagcaaataaaattccggttgtgttcggatcgatacgatacaatgaatccagtaattggtttgttgtcattttttgtggcgtgatgtactggtattcaatatcaggatttatggcttttaactttatctgtatatccagattattggtttggttgatttctctctcgtcaccgataaacataaatttcttcatatcggggattatgtgagagatcagttggatattttcctgtaaataaaggtttgagtataaaagcaccagattgtaaggatcggcaagttgggagaccggaatacgctccgcctgtgtaattggctgtttgtagatgtaggtgtctttaggacctatgaacttttcttccgaacagagtacaatagggatgtctccccaaagctttctatattcgtcacgtagtaatagagaagggcttcccaataatattagcagccgtgggcggtgatgttcgtatttctgagagatcatattcttgaattcccccaaaatcgtatcgttatcgatcattaaagtagtcatatgttccgcatataatgccagtttagggttcttttgaacgtattccgatacggttgagatcatcctgttactccaaggagaagattctgcataggaattgatgcataaaatatagtttgaaatatctatgtggtctctttgtgctaaaataggagtaatagatatgaagcatagaaaaaacaatagcagatgttttcttatattcatggaagaatgatgtttgtgttcgatatattatttgttgatttgatacggacaaaagtagtaaaaacaatctgaaaaacgataatatccaattaaaaaataatacggaaagaatgggagacaatagacttttctaaatgaggaggagtgataggtagatgcatgaaaagggatatgcttgttttttatcaacaatgggcttgttatttgtttgtttttattaataaatgaggctgtactatttgcttgttaaaagcggaattcgtaaatcgctgattattaatattgtatggatgtctattttttccttttaaaccaacgagccgttggtttaaaaccaaggacccgtcgcacaccgaggaacgggccgttggttttaaaggaatggatgatttcaccattcaattgtatgaataatactttttatgtgtagatttattccttgatatactatcgggactatttcaatgcttctatgactttcggtagcattgtccagatcgtattctcatcttgtgcagtaaagaagttaccatctatctcagatttttcatccgtggcaattccgttttgaatggcaggtttggccagcgggtggacagcgacttttataccttttgttatacctgtaaagtcaaacatcattgcaccggcacagtgcccgatcatcatctttcctttttctccgaaagtcttgatgacttccatcaagtccacattgtatggctggtttgcatactgctggaatacaggtactgcatctccacaggagaatacaagtgcatcaaattcgtcttcatgcccttttagattagcaatcacatcatctactatcaggcccattcctgaattggttttgatctctttcgtatctgatacggcaaatactttataggaaatgccattttcgaaaaaggcttccaagtattggaataaaccacaaccatttaccggattcactgctaaaactgctactttttttgccataatcataattatttaaatgaaacaatagttatttttagtaagtttattacttttgtgatgcaaatgtatctaccttaattgagaaatacaagaacgtacctcagaataaggtagttacatggaagtaactattgttgaaactcagtataatacaaaacgttaaaaagatgaaaaactttcacccgacagggaattgccccgtaagagatgtcataagccgcttgggagacaaatggtcgatgctggtactgattactttgaatgcgaacggtacgatgcgttttagcgatattcataaaacgatagaggatatttcacagcggatgctgactgttactcttcgtacgctcgaatctgacggtttgattgaacggaaaatatatgcggaagtacctccccgtgtagagtattatctgacagatacaggaggaactttgattccgcatattgaaggattagtgggctgggctttggaaaatatggatacgattctggagcatagaaaaagtaactgacctgattatgaataaagtagtggatactgttctaataaagtattcactattttatttcattccatttcggcggagttgtatttaatagattgcgcacgaagaagtcatagcgtttatgttcaccgaaactttctcccatggtatgatgagcaccgggaataactactaactcaaaatctttattggctttgatcagcgcatttgctacctgcatggtagaagccggatctacgttatcatccatttcacctactaccagcattaacgggcgactgagcaagtgagcattctcaacattcgatccttctttatattgttcaccaaccggataacccagccattgttcattccaccatatcttatccatacgattgtcgtggcagccacaggcagaatatgctgctttataaaattcgggatgaaacagtactgctgtcattgattcctgtccacctgcggaacaaccataaattccgacacgatctatgtccatataagggtacttttgggcagcggattttatccaggcaatatgatcgggcaatccggcatctttcagattcttgtaacatacgttttcgaaagcacgtgaacggaaagaagttcccataccatctaccatgacaacaataaaaccgagttcggcaataccactcataaagtagttataaggaataaaggttttgggtacgtattgattgcccggtccttgatagatatattccaaaacgggatattttttgtcaggatcaaagttgctgggacgaatgatgattccccacatatccgtttttccgtcacgacctttggcggtgaatacttcgggggctttccaaccttcagcttccagacgactgatatcagccgtttcaagtggcatgatgacttttccgtttttggcatctcggagtacggctacaggagctttgtctaccatagaatatacatcaaccagatattgcatatcttttgagaaccatgcattatgcattccttctgccggagtgagacaagtgagattcttaccgtcgaagccgatacgataataacggatcaggtagggatcttctttagcttgtacgccatttgccgagaaataaataagttggttggtttcatctacccggaggatatcacgtacgtaccattcgcctttggttatctgacgaataggctgggccgtagtacggtcatacatatacaggtggttccaattgtcgcgttcactcatccatatcattcgttttccatcttgtaaatcatgtcggaaacgacgggaataattaacgtatttgtcgcttgtctcttctattaacgggcgtacctttcctgttgcggcagaaaattccaatacccggtagacctgatgtccgcgctgattgtattcgaaagtgatggcttgactgtcgctgttccattcgggggccgtaatgtaatattgttgagagaataaatctgtcgatggaatcacactgtgtcctgtttccacatcgtatatgcagggtatcttaaacggaagttcatcgcccggtttggcatactcttgtttatggagtttgggttgaagttgatcgcttggggaggattccacataatatacatagcgtttttctacgggacgaattttgcaggaagcgacttttttgctgtcgggagaccagcggatataggctgagtaataatttcccaaggtaccgtccagacttagctgtttttcttttccggtagctgtttcttttacatatatattatgattcttaatgaatgctgtatatttcttgtcaggagaggagacgggagcagccgtcttttcatcatctgtttccatccagtggcgttgtttgcgtggagtgggcagagcaccttcatctgtcagttggtttttgtcgataacatacacccagcgatgattgttgaaaacgaaacgtagcgtatccagtccgttgttgacagacagacgatctaggtaaagagaagtggcttctattttgcgtcccgatgcctcactcaaagctgctgccacgagtttgtggtcaaacaagtcttttctgttttgagtgtcggcatccactaatacatagatacgtccttcgggagtatttcgtacataccagaaataatgcgtttcaccaatccacttcggattgacattggaatagaatactttgtttgcactgaatttttctcctgctgagtaagcacgacggtaatcttctatagtaccttgtgcaatggctatgtttgtgcagaaaaacatggctgctaataaaaaaatagatctgttgaatttcataataatgatggtataccttactatagaaactgttttttaaggtaaatgattttattaatattttttctgtcaggcaaagatacgaaaaaatgaaaatcttctgatgtgatttctgaagatgagctaaaaatagtggtgtatttttcgctcaattatgggtgaaaaaatgagcagagttgattttagaccttacgtgatagtattttgtactttgttttaaactaaaaatatcatatttgcagtagaatttctaacggatattaaatagataaaagagaagataacgataggtaattagaaaaggtaaaagaattgtttttgggattttatcggtgttgattagtgataatataataaattaatctttgttaatatgactcgtatgaaaaagaagcattccttttataataaagaggatttcctacataatccttaatttttatttatcttccgagagaataaaagaaaattctcgagcaaaagatattgagagattaatagatggttaatctggtaaactatacaggtaatatcgaaatttaactattaaatttatacatgaaaatgaaaacgaaaagagacagatttaatctgttcgagaagagatggtcaatgctgcttctcttattcatgatgagtgtcgcttcttttgcgatgtccgaccagtcatcggcaaccgttcgcggccgtgtaattgattccaatggcgaggctcttattggagtatcggttctagtacgtggaacacaaaaaggtaccattacagatagtggaggtaatttttctatttcgggtgtatctgtcggttctgttctggaattcagctatatcggttttgttaaaactgataaaaagtttgatggtaaggagatgacagtcattatgttggaagacaatacttcattggatgaagttgaaattgtggctttcggaactcaaaagaaagaaagtgtgattggtgctattactactattgctccggctgagttgaaagtaccgtccagtaatttaacaacatcttttgccgggcgtatggcaggtatgatttcttatcagcgtagcggagaaccgggtgctgacgatgcttccttttttattcgtggaatcactacattcggttacaatcagaatcctttgattttgattgataacatagaattgactactgccgatttgtcccgtttgaatacggacgatatcgaaagtttttcaattatgaaagatgctactgctacggcactttatggagcacgtggcgcaaatggtgtgatttatgtgaaaacaaaagagggtcgtaaaggaaaggcaaagctgaatatcagagttgaaaattcgatttcacaggcgacaagagagatagaacttgccgaccctgtaacttatatgcaactgtataatgaagcaattgtcacacgtgacccaagccagccgatttatttctcagaagataaaattgcgaatacggttcccggttctaattcacttatatatccggctactgattggaaaaaggaattgctgaaagatttcacaatgaaccagcgtgctaatgtaaatataagcggtggtggtgacgtagcacgttattatgtggcagcttccttctcacaagataatggtatcttgaagcaggatggaaacaataactttaataccaacattaatttaaagaagtatacactaagatcgaacgtgaatattgatgttacaaagactaccgaactgctcgtgcgtctgagtggagcttttgataattattcgggaccggttacttcgggtactgaattatataatatggtaatgaaagccagtccggtattgttccctgccaaatatccggttgatgcagatcatcagtatgtaaagcatacactttttggtaatgcgagtgacggagtcctttacctaaacccttatgcagaaatggtacgtggttataaagagtatgaacgctcgaatctgggcgcccagatcgaactgaaacaaaaccttaaatttataactgaggggttatctgcccgattgatgatcaatgcgtcccgtatctcttattatgaacagccccgttggtatagcccgtattattatggattgtcaacttacaaccagtatacaggagagtatagcatcgatatgctgaattcggaaggaaccaataaaggtaccgaatatctgacctatgatacaggcaaaggaaagaaggaattgacttcgacaacttatatagaaggagctttgaactatgcacgcgatttcaaaaagcatggagtcgggggacttttggtcttacagataaataaccgcaaatatcctaattcttccacgttgcaaggttcgctgccttacaagaacatcggtctttcaggacgtttcacttacagttatgataaacgttatttttcggagttcaattttggatataatggttcggagcgttttgaaaagaataatcgttggggatttttcccttcatttggtttgggatggatgatttcgaatgaaaagttcatggaaccattgcaaaatacgatctccaaattgaaacttcgtgcatcttatggtttggttggtaatgataatgtcggaagcgaacgtttttattatttgtccgagatttcaatgaactcttcggcagtcggtgccagtttcggatacaataagggagcctatggtaaaaatggagttttggtgactcgttatgccaacccggaaatctcatgggaaagagctacaaaagtgaattatgcattggaactgagcttgtggaacgaattgaatatgacccttgaatactatacagaacatagaaaggatattctgcaatcgcgcgctaccattcctaattcggttggattaaaagctactccgtatgcgaacatcggagaagcaaaaggtaacggtgtcgacctggccctcgactataataagatgttaggcaagaaaggatggatacaggcacgtgcaaaccttacatatgctaagagcaaatataccgcttatgaagaaatggattggggctatccctggaaaagccgcatcggatatcctactactcagacttggggatatatagccgaaggtctctttatagatgatgcagatgtagccaactcgcccaaacaatttggtacttatggagctggtgatattcgttatcgtgatttgaatggagataatgtgattacagaagcagatcaggcacccatcggatatcctaccagtcccgaaattatttacggttttggtccgagctttggtttcaacaactgggatttctcattcttcttccaaggttccgcacgttcctcctttttcctgagttatagtgcaatgtcccctttctttaaggcgagcggttcgaatggtatgggaggagattatggaagcaacaagatgacaactaccaacaatctggcaaaagtaatagctgataatcattggtcggaagataatagagatgccaatgcactttggcctcgtttgtctacctattctatcagtaacaataatcaaaccaatacctggtttatgcgtaacggagctttcctgcgtctgaaacaagtggaaataggatatacattaccgaaaagattattatctaaattgggtgccagcaattgcaggttctacttgtcgggaaccaatctgttctgtgtatccagtttcaaagactgggatgttgaaatggccggtaacggtttgggatatccattgcaacgggtatataacataggccttaatttaactttttaaatgcttgaagatatgaaatcgataaaacaaattatatttatggcacttgtcatagttacatctgcgtgtaatgattatattgatgtagtgccggataatgtggcaactcttgataatgcttttgcattacggaacgaagccgaaaagtatctttttacctgctattcctatttaccacgacacggaagcgcagattataatcctgctttcttcggaggagatgaattgattccgggaagagattatgctaatggcataaatcctcactatcttatcacaggccgacagggtatctcaacagtctatatggatttttggggtggctataacggaggacaaatgcaaaggaacaacgaaggtggaaaaggtgcttatgacgcaattcgtgattgcaacattttcctcgaaaacatagggcgggtacctgatatgacggaagaagaacgtcagcgttggattgccgaagttgagttcttgaaggcttattaccacttttggttagtaaagcaatacggtcctattattattgttgacaagaacctgccgattgatgcgggtatagaagaagtaaaacagttccgaaatacactggacgaatgttttgactatatagtgggattgtttgacaaggtcattgccaatgaatatcttccgaataagataaccaacgaggctgaagagttgggaagagtaacacggatgattgccaaagctgtgagatgtgaagttctgataaaccgggcaagtccgttgtttaatggcaatacattctataccgggatgaaagataaacgggacattgaaatatttaaccctaataaaagtgaggacgagaaacgtcaacgttggatagaggcccgtgatgcgtgtttggatgccattcaatttgcagaaggtctgggacataaattgtattattatattccgggagaatatccgggactaagtgaagaaacgttggcaaaactgaatatccgtatggctgttaccgacaaatggaataccgaggttatttggggggatgctaatagttgggtcggaacgcaaggcaaagatttgtcactccattcattgcctcgtgaccttgatccgaataagattaagaatacgacacagcgcaataactatgcggttcctatcaagatagcagaacagttctactctaaaaatggagtacctattacagaagataaaacgtggaattatatagaacgctataagctttgccaggcaacagaaaatgagaaatatctcattaaagaaggagaaacaacctgccagttgaactttgaccgtgaaatacgttattatgcttcagttggctttgaccgtggcatctggttcggacaaggaaagactgatgacaatacctgttattttgttcagggacgttttggagagccagcagccaattctgtacagaactcatggaattacacaggactttggcctaagaaactcgttcattttaaaacagtcatttcagaaggtacaagcggtcagactgccgtagaatatccatttcctatcattcgcttgagcagtctgtatttatggtatgccgaagctctgaatgaatcgggagaaacggacatcaacaagatattcgaatatgtggataaagtcagagaacgcgccagcctgaagggagtggaagaatcatggaaagcatattctaccaattcggataaactgaacacattgaccgggcgaagagaaatcatccagcaggaacgtttgattgaatttgcttttgaaggtcagagatattgggatatgcgccgttggctgcgtgcacatacggaatttcctaaaccattgaccggttggaatctgaaaggggaaacagccgaagattactacaacgaaacaacggtggatattacgcctgtattcaagattaaaaactatttcactcctctgagcgaaacagagatgaaacgaaatactaatttgttacaaaattacggatggtaaaatataaaatacaaagattatgaatagaacgattatatatagtttattagccgtctttttatgtttgtcatttgccaattgtggtgacgataacgtaaatgaccccagaggaacaggtgacattccggctcaaattgatgtcaacacagtgaagataaaagacatgagtggtacttcctatatttactacgaacgcccgaatgatcgaaacttaaagtatgtacaagctgtatatacactggctgatggaacagaacggaaattcaatgcctcgtatttcaccgattcactcgtggtcgacggatttccaaaagagggtgaatatgatgtgaaactgtattcggtgagttatgcagagaaacgttccgagccggttgttgtgaaggtgcatccggaagagcctccttacaagaaagtactgacagactgtaaagttgaagatactttttccggtttccgttttatctcaaaggatgaagtcggaaccgatctgtccattatttttttgaaacaagttgataataaggactgggaagagataagcgcttattacacacgtaagtccaattctttattacacattgtcagaggaatggagtcacaagagacaaatataggaatttatgctacggataagtggggacataagtcggatactacttatgtgactgtaacaccttggtatgaaattgaaattcctaaaaagaatccgttgtggaaaaacatggatttaccgggtgatgctgaaatgcattcatggggtagcagttcgcatgtagccgtagagaagttgtgggatggaatcactgtagaagtagcaggaaatgatgcctggaatacttgttatcatacgatacccggcaaagggcttcccaaatggacttccattgatttaggtgcaaaatatgtcttctcacgtgtcgtgtttcattggcgtggaggtactaccagttctgcttttggcaactacaccccgaaagtgcttgagatgtatggtagtaataatcctacaatgagcggtgaatgggatgacagttggacgaaacttgaaacattcaacattgttcgtgaagatggcagccagacaccacagtctgaaatggctttgactgctaatgagaagctgcaggcggcagaaggttataatctggatttccctgttggaattgaggcttatcgatatgtacgtctgaaaataatcagtacgtttggcggacttgattatacggcaattggagaaatgacattgtatgggcaggaaccggaagaataataaaatctgattagacatgaaaacattacatataataaagaccaatttaataggtttcatattgctcgctgtcgtatcagcgtgcggaggaatggatgaaacttacaaagattttataggagacaaaccgattgtatatttggcgagaaacgagtcggattcaataaaggtacaaaacgggcgtgaaagagtgagaatgactataccgccgacaatggatcccagaattgaatatgtcaaggtaacttggaacaacggtatgtacgaaaagaaagttccggttgtttataaagaaccgacagtgtttattatagatgagaacttgccggaaggaatgtacgactttgtcatcactaatcatacggaagatggcttgtattctatttcagcatcggcaacaggtgaaacctacggagcaacctatgaaagttatttgcggaatcgtaatatccagaagatagaggtagatatggcaacgagcgatatgatacttcactttcctatgttaagtgatagtattattgaggggacggaattgaagtggatgaaagacggcatcgaaaaaacggaatattttcctaatacggaggataatatgatttcgattgagaattttccttttactgatgaagaaataggagagttccagtaccgggtacacgtcctgcccaataaggatgccatagacgtattctatagtgagtggcaaacctgtcgtttccaggtgaaggaagaagtagtaccggcattgattgaatctgtggactggaatattacgacttcatatccgactctggtggatggaagtaacggacctgcaaaactcttgattgacagtgatccaaagactttcatgtcattgaggaaacccggtaagaatgagattccggcaggtacagagagctactttactattgatatgggagaagagaatacattcgactatatcgaatggtatcatagaggcggtgatacgcaactgggattgagagcttgggcgatagttgtttatggaagtaatgacggaacgacctttacgaagatcggaaatgatataaacattccgggcgaaacggacaggactatcatgaatgcgacgctttctcttccggaatcaacctggcggtatctcaaaatagaatttacccgttgggataaagtcaataactcagcaatacaggtgggagaatttaaacttggatattcgaagactcagacaggtaaaggagttggggtagtgctgtaacgctacatacaaagtaacgtaatgataaaagagaaatacggaatgactgaaaattccgtatttttcttttttatttatgcttcatcgttttccgaaggcaaatgatggaatccatttgcaagagtacttccttcggcattcttcattttctcctgatactccgtaggcgtgattccaaattcatctttaaagcatttggtgaagtatttgggtactgagaaccccgtagcataggctacttccgatatattaacggatttgtctttcagcatcgtgcaggcatgtttcagttttatattccggataaatcccagaggagtaagtccggtgatcactttaaatttccgtgttaacgtagaggtagacatattcagctccatagccatttgtggaatatcgaaatcggattcactcagatgcgtttcaatacattcgatggcgctgttcagaaattgttcgtcgacactctgataatccagagttgaaatattcatttctgtcttcgaacggaaactgagttgccgtgattcgcgtgctttgagcagattctctatacgggcttgtaatattttcatttcaaaaggcttcgcgatgtagctttcggcacctgccttgtaacattctatctggtcttctgttccgtttttagcagtcagcatcagtaccgggatgtggttggtctgtacgtcagctttcaggcgacgacagaattcaagtccgtccatttcaggcatcatcaggtcacatattgctatatctatattgttgccggaaagtaattcgagtccttcaattccatttttagctgtaatgagctgatagcttttccccaggatatttctcattagttcccgcaagtctttgttgtcatcgacaaataaaatgcatggtttgtcatttgacttctcattttctatcatggattcagcctcttcgtcagctgatactgttgcttcttggatttcttgtttgctgtatatttctttatcaataggaagttccaccgtaaatacagaacctttattggcctcactttgtacttcaatgcttccgtggtgtagtgttatcaattcttttgtcaacgataaaccgatgccattggattcacaccccggtagcctcttgttgttatagaacttattgaatatcagtttgatttctttggcaggaatgccgataccttcgtcttctacttggataaacagatatctgtatccatccctgtgcattacttttaaagtcagatgaatttgtttatgttcaggggtgtatttgatggcatttgacagtaagttaaataatatcttgtccagtttgtcgaagtcaagatagccttgaatgccttcttctatctgagtgatcagccggatatctttcttttgagccaatgtctggaagttggatgctacaatttcagcggtaaaagaggatatatcccctttacagacattaataatcattttaccgttttctactttacggaaatccagaatttgttgcaacagccttttgagacggttcacattagcccgtaaaatggagatttgattctccgaagttttatcattctgctccaggtcatctgcaacacaagatatgatggtcagtggcgtcagcaattcatgggatatatttgtaaaatagttcagttttatcagggtcagttcttcctgaagtttgattgtatttttctcctttattcttcggatatagattctgaaactataatagataaaggcaatgataattatggcatataggcagtaggcataccatgtttcataaatggcaggcagcctgtgaatggtcatgacactttcttcttcaatccagttgccatattgatcagtagcctttatccggaaaaggtatttccctttgttcagctgattgtagaaagcggaatgtttgccttcgtcgatatgggtccatttggtatccattccgtccatcttataggcatactttatctttttcttgtgcgtatagctgaaagaggagaacaatatttctatatttctggcatctgaaggtaatgtaatctcgcaaacagaattttttgcattctgtttatgaggtgagaatagaagagaatggctgtctacttttacgtctgtaattaggacatgattgccggaactcttttcgggaggatcattagcaggcattatttttataaagcctttgtgacctcctgcatataagacccctttgatatcgataaaagcggctccgtagcggaaagaggatataaatatattgtcgtcggcaactgaataagttgtgttctcagcttgtttcaaatcatgacggacaatatatttattgtatacaatccatatgttttctccgcatgatcttatttttcgtatttggttgcctttcaagccccatgccactgtctggtctgttatctgttgtgtctttggattatatgtgatcagccggcccagtgaagtggaaaaccatatctgattgttttcatcaatgcataaactattaatggattcgtcattgaggaaagcaaattcttcaatgtgtttttttactattttggggtgcccgtcataggaaagttggtaaatgttttgtttgttgcttatccaaatatagccgttttcgtcttctgctacatcggtaatattggatatttcaaaaggagtttttgatacacgtgtggaatctgaaccccttgtgaataatttattttcggttccaatccataaatttccatttctgtcttcgaatacttggctgacaaagcccggagaaggatctattttaaataaatcgatttcttccagggttgatattctcatatcatcctgtttcattttccagacttttgaagcttcccgactacctaaccacatggtatcatcttttcgagaaggttcgatattgcctatatcaatggaatataagctgtttctggctggcccgtagactattttacggctttgctcgttgtataaacaaagtccatatcgtgcctgattaaaccagatgatgccttgggaatccttattcaggcaaatgatattagcatcgagtcctattcctttttggatgtcgtcaatgatgtgattttctattttatttttttcaaaagtaatagaatatccccggtcgaaagcgcctaaccacagattaccattgtggtcttttataacccggctgtacgatttacttttgtcgatagggtaatttttgttggacagatgttctgtatctgctatttctagttcgttgtgttcatttgcttttaatgtgtataagccaaaatgtgataatgcccataaatatttgtaggtattgtcttgtatgatatcatagaaagtcatttccggggtgtttcgtaccggattattgatcgtttgttggcgaaataactcatctttgggggctccggggagaaagttccagatgccgtcgccccaggttgtaatccaataacggtcctcattgtcctggaacattctgataggattgttgctgttgccgatttggggtaagttcaaaaaagaatcatcgttaggagagtatttaaagatccccaatccccatgttgtcacccatatattgccggcatggtcctcaaaaatggcattgggacatgcttgaaaagaagaggaggaagaactgaaaatatatttcttctgaattttcaggtcagaactacatttgaatacttcgcttcgggtggcaacccaggtttgtccgttccgatccgtcaatagatctctgatcggcttttgcatgatatgcggatcggggaaggggataatttgataatcagttttgcggatcagattgactcctttgtcggtgcccacccaaatatgatgttcatcatcagcaaaacaattgatattattgttgatcagttgctgtggagtttcatagttattattgaaaatctgcgtttcatatccgtcatagcggaccagcccatcgggagttcctatccagataaaaccttgcttgtcctgatgaagtgttcttatttcattggaagaaagctgatcgagaaatggaattggtttcgcaatgatttgttgggcatgaatggctgtcattccggatgtccaataaaaaagacaacatatcgataaggttgaaaagagtgttttcatcatatacttcacttgttaacgtttaggacaaagataacgaatttaaataaaaacagcttttatttttttaaactatgaggacttaaattcatgcatttatgggtgaaaaaaacgtcattaccgaatttatggactatagagaactaaatttgtacgtcttttaactggagaaatagcatctttgcttatgaaacaaaaaaaatgggtaacatgagaaatagtttttttatcgggtgggttattttcttaggaataacaacaggcagttgtaccggaaaaacagaagatagtaaatcagatgaacaggtagtcaatcctgctgatactatttatctaggagatttacgtgaaaaatttgtaggtgactctttgttctttatggtggttgcaccagatctgattttggataataatcagtatttttggacagtaactgaatcgtcagccttggagaaaggactgacaaaagaatattataagaaagtcaagcaagaaatttctgcaactaacaatgctatcaggcggggagtgatgaaaggagcagatgtgaaacgcatttatgattttcagaagacagaaccaacaaaatagagaatgaataaaaatcacattgaaatatagcaaaactaaaaatattacatatgaaaactaaaattttactcctgtttcttcttatatccatcgccggagctatcccatgtatggcaaaaaaagcaaaagtgaaggatgttatggatattatttatcaagtgaatgattattggcagtctactcatccaaggcatggacgtgctttttgggacaatgctgcatatcatacaggaaatatggaggcctatttcctgacacaaaaaactgaatatatgaattattcgctggcctgggctgaacataatcaatggaaaggagcaaaatctaacgataaaagcaaatggtcatcttcctatggagaaacggatgagtatgtattgtttggtgactggcagatctgttttcagacatatgcggatttgtattcggttcagccggaacctgaaagaatagcccgtgcccgagaggtaatggaatatcagatgagcacatcaagacataactattggtggtgggcagatggtttgtatatggtaatgcctgtaatgacaaagctttataaaattacagagaatccgctttatctggaaaaattgcatgaatatttggcttatgccgatagtctgatgtatgatgaagaggcgggactgtattatcgggatcgtaaatatgtttatcccaaacataagagtgtgaatggcaagaaagacttttgggcaagaggggatggctgggtacttgctggattggctaaagtgctgaaagaccttcctgagacggataaatatcggaatggatatatcgaacgtttccggacattggcaaaatctgtcattgcgtgccagcaaccggaaggttattggactcgtagtatgcttgatccggaacatgcacccgggccggaaacgagtggtactgcattctttgcctatgggttattctgggggattaataatggtttcttagataagaaaacgtatgagccggcagcaaagaaagcctggaattatctcgcaaatgtggcattgcagcctgatggtaaggttggctatgtgcaacctataggcgagaaagctataccaggacaaatagtcgatgccaattctacagccaattttggtgttggtgcttttttactggctgcttgtgagtatgtgcgttttttatcgggaaagtaagtttaggaatattgtaaagtcatgaaacgtaatatagttatcatcctgtttgcgataagttggattacaggcttatgggcaaaagatggattatctaatggtgttttagatatttgtagtgaatccccggaagtcagttcttcctttagtggttatgagataactcctaaaggagcctggtgctggtttgccgatccgagagcacttcattatgagaatcaatcggggacaataagaagcacttatatcggttatatcgatgtgcatggcaatattaaagctactcagtatgatcatctgaccaatcaggtcagtgaggtgctgatacgttcatatttccaaccggatgatcatgataatccgacgtttctcgttttgccggatgagcgtatcatgattttctattcaagacatacggaccaaccttgtttttattatcgggtatcccggaaagcaggtgatataacgaccttaggagaagagaaaaagctgatgacgaagaataataccacttatccgtctccttttatattatcatcagatcccgatcatatttatttgtgctggcggggaattaagtggcatccgaccatagcaagaatacttattccggacaggaatggggatacgaactttgactgggggccttatcagatggtacaatctaccggtgcacgtccttatgctaaatatatgtcgaatggcaaagacaaaatctacatgacatatacgaccggacatccggataatgagcaaccgaatcatgtttatttcaattatgttgatatcaatgatatgaagttgaaagatattcagggcaaagaactttcaatcatacagaatgccccacatcgtgttaataagaaatccgattatatctctgttcatccggcagccgttgtagatcattccaattttcggaactgggtctgggagctggcattggatgctcatgaaaatccggtgattgctatggtacgaataagtccggataaaacaaaacatgattattactatgtaaaatggaccggtaatgagtggcgaaaaacatatttggctcatgccgggaagcattttcatcagactcctgatacagaaagatgctacagcggtggaatgtcaatcgataaacgattcccggaacagatttattgttcggttcctgtcaaaggagaccatgggactgtatatgagattgtcaagtactcggtagatgtcaatggaaaggtgaagcaggaagctgtgacttaccattccaaaaagaataatgtcagaccttattgtatacagcatgcgaataatcgttctttgggaatggtctggatgtatggagattattatgactggattgtcagttctgcccgtccgttgggatattctacagctattcacgggataagtccgctgccggttgcgcctgtcgaattggataaaggtcttgtgaagcataaaagctttgaccgcaggaattccggtgtcggtgtgcagaaaaggatgatggaagtttctgcagcaaaagagcggaagctggtgaaaggcagttctgcaaatacattcacagtatctctttccttgtgtatttctccggactcttattccggaaatatcctgaagttgggggatattacttattccttggatgctactgcacaaaagcctgttgttacagtcggaactagtatttataaaagtactaacgtgcttggaaggtcagatacatggaagcaacagaagagagctactgatggaaaatggtatgctcctgaaaaactgaaaacgtttaacctgagtataacttatgctgacggtgagttgcgtactttcctgaacggacttttagatcagacaataactgtaggcaaacttgtattgggagatgtaacacttggaggatttaacggacaggttgcagaatactttatttataatcgcggattgtctcaggatgaagttaaatcactctctgcccgggttgacatgaccagtgacactttaagaaaagatgagaaaaataaattttaagtagtatctttgtatggtcgcaaagaaatagataaaagtgacaaaaaaacctttatttgctggaagtatgcgctttcctacttcagccttttttacgaggcgcagtgcttacagcttaatttaataagttaagtctatgaacatgaaaatagtttttctttttataatagctatagctttatcatatagctgtgcccattcacaatctgctgataaagggcagaattattatgtggatgcagagaatggtaatgatgcaaataatggattatcccagcgacaagcatggaaaagtctggataaaataagaacgttacaattaaaagccggtgatagcttattattccgtcgtggctccgtatttcccggtattttggaaataagtgcgaaagggcgttcggaccggcgggtggtgattgatgcttacggaaaaggacgaaagccatgtattactgctcctgatagttctctttatgcagtctgcattaagaattcggattatgtaactcttcagaatctggaagtgatcaataaaggaacagagcgcatggcacgtcgtacaggagtcaaagtgttgtgtgataattatggtatatcacgtcatatcattcttaatgcactggatatacatgatgtaaacggaagtctgataaaacatgatggcggaggttctgctattctgattcagaataaatggaagaaggacagcattgtttctgtttttgacagcctgactatcgaaaattgtgccattcgtcgttgtgagcgtaatgccatcatttggagtgctccctggagccgcaagaattggcatctgagtacgaatactatagtacgtaaaaatctgatagaagaggttccgggggatggaattgtacctatcggatgtgacggggcattggtagaatataatctgatgcgtaagtgcacggctcttttacccgacgggcaggcagccgcaggtatctggccctggagttgtgataatactactatccaattcaatgaagtgagcgatcataaagctccttgggacgggcaggggtttgattccgattttaattgcacccatacactgattcaatataattacagccatcataatgatggaggattcattttaatctgtaatgcagggaagggagaaacgaatcctgctgataacatcggaaataaaggatcgattgtacggtataatgtcagtttgaacgatgctgttcgtgcacgaaaaacgcatatcggcattttctcgcctaccatacatatcagcggaccttgcgaaaacacccttatcaataataatatcttgcatgcaggtgtgaaacctgccggacatattgaaaggaagatgatcacttctaattcctggggagggtatgccgatcaaactacatttaaggagaatcttttttatgctgccgaaccttccgcgtttaattttactcaatctactcgtaatacttttgatggaaactattatctggggagtttcgaagcaaaaccggtagacaatcagggacgtaacgcttctgtatattatagttcgcttatagaaaaggattcggaagatttcgcttctctttctcacttatttgaggaaatagaagtaggggatggggcggctattcttaaagctgtaaagaaagaagcaattcatcttttctttgagaagatgaaagccgcagaataaaccgggatttaagaatgtacgttaagttccttattttataaatgataatagtcggtgaaatgaatatgaaaacacaatttatagccttatcgctttgcttgttggctttttgttctgtggtagaagccaaagtctcttcccgtaaaagcagtaatttcaatcgtgaatggaagtatatgcgtggagatcatcagggggcggagcaaataatctatgatgatagtggatgggaacaggtcgggcttccgcattcttttagcataccttattttatgtcgaaagacttttatacaggctatggttggtatcgtaaatctttgaaactgactgaaaatgaactttcgcaaagaatatttcttgagtttgacggtgtatttcaggaggcggagatttttattaatgccaagccggcaggaaatcatgtaggtggatataccggtttctctatagatatttcctctctggtgcaggcgggtgataatatgcttgcggtacgggtcaacaattgttggaagtccaatgtcgctccgcgtgcgggcgaacacgtttttagtggaggtatttacagaaatgtccgcttggttatgaaatctccggtgcatattgactggtatggtacgtttgtgacaacaccggatttgggtaagaatcaagggaaatcttcatcggtgaagatagagaccgatgtatgtaatacttcggaaaaagagggaatttaccggttactgacacaggtactttcgcctgacggtaaagtcattgcttccgtagaaaccaaagaagccattgccgcccgtagtagcaggaagttttcacaggctacccggactttaaataatccgcagttatggagtttgtctgctcccgttttgtataaggtagtcagcaaactttatcaagggaaacaattaatggatgaagatgaaaccactttcggtttccgttggtttgagtggacggcagatcgtggtttctttctgaatggcgaacacctttattttaaaggcaccaacgtgcatcaggatcaggccggttggggagatgccgtgacagaagcggctatgtatcgtgatgtcagcatgatgaaagaagcgggattcgatctgattcgtggttcccattatccgcacgcacctgcattctcccgggcttgtgatgagctgggaatgctcttttggtcggaagctcccttttggggtataggcgggtataagcctgatggatattggaactcaagtgcgtatccggtgaataaggcggatgaggcagattttgaagaaagtgccttgcagcagttacgcgaaatgatacgtattcaccgcaatcatccttctatcgtagtgtggagtatgagtaacgaagcctttttctccgctccggaagcaatgccgggagtacgtcgtttgttgaagcgcatggtcgatttatcacatcagctggatcctacgcgtccggcagctgtgggcggtgcccaacgtccgcttggtgaagaacgcatagataagatcggtgatattgccggatataatggggacggggcaacgcagtctgattttcagaatccgggaattgctaatgttgtttctgaatatggaagcaccactgccgaccgtccgggagaatatgcgcccggatggggagatttgaaaaaggatgatggttggaaagggcgtacatggagaagcgggcaggctatctggtgtggtttcgatcatggaagcattgccggaagcacattgggtaaaatgggaattgtggattatttccgtattcctaagcgttcgtggtactggtatcgtaatgagtatacgcaagtagcaccttcttcatggccgatagaaggcgttccggcacagttgagactggaagcgacaaaaaacgatggcgttctcactgacggtacggatgatgtgcaattgatggttacagtgctggatgcatcgggaaagctcttgaagagtactccgcccgtacaattaagactgatttccggaccgggagagtttcctacgggcagttcgatcttgtttgaaaaagacagtgatatccgcatcatggatggacaggctgctattgccttccgctcttactatgcaggcaagtccgttattgaagcaacttctcccggcttgaagccggcacgtgtagagattcactttacaggtacacccgtatatgagcccaaagtaacgccgggcgtaaaggaacgtccttatgttcgtttcgtacgcgggaataaagaaacgattgtgcagactttcggacgcaataatccggcatttgcaagcagccagtcaggaaaacagagtgcaggtctcgctgcggacgggagtgtggataccttttggcagccggccggagaagatgattcctcttggtggatgttggatacggaaaaggggctgacattgcgcagtattaatgtacgttttcccaaagctgctgtttaccgttatgctatagaagtttcggatgataataaagaatggaaaatggtactggacaaacgtaatgcggtgacggaaagtcagaaggtaaataaggaatttgcagttcgggaagcaccgacaggacgtttcattcgtatcagttttgcaggaggatcggctgctgccatttcagaggtggaagtcagcggtgtggtgtgtgaatagtattccggaaatatcttgttgtattatacggaagaagctgctcaggagttttcgggaacagtatatgttcccgaagacctggagaaaatacttctctgatatatgtgatgcagtaagccgccatcattgtattttatccctttacgcccataaatttgaaaggcaacgctgttttaaaattcttggctgtatttccatgatacatctccccattggcaatagacagtttgaacaccggagccccttccgataaatcgaaatcctgcagatttacccaaaaggtattcggagtcagacttgattcgaaaaagtatctcaggttcttgctctccgaaacggttctccattgcgtagtggaaatctcgggattttcgggagtggatatcccgtaaggaacagaagcattgcgtacaacactgaatacactggcaacagctattcttttatcatcggtcgcgggcaatgcgttgatgtagaagctggctctggcaaagcggtcggcagcgcgattcgtaccgggcagaaagctcagtcctcctattgatttccagtattcgctcagtgccagctgcttgttgtaagtaggagagttggtcataaccttgtattccttactgtgatataccgtgagtttcccaccgatatattcaaaaatggcacagtcacctgtagcatccgaaatagataaatgtaaagtggccagacgggaaccgtccggcatcatatccgaaacgacctgaaaggtatcttcgtcaatgtatgctacggcttcttctacggtggcaaaattgtccagcatatattgcacccaggctgtaatggcaagtcccggtttattcttatctcttacggggtattcggtttcgggcaaccaaagcagattggcgaccagccctttctcattcataccgtccgtactggcgatctcgaaagcggaagtcactacgctaccgtatctggaggtccattccagcgagttctctccggtttctccgttccgtttcatccctctgggaaacacccaaaggttgctgtgcatatctgttttccagtccatagaacgaccggttgctaccataccattgcttcctgaataaacgactctcgtacacataatttcgatttttagttataggtttattattggttattcatctgtgagatgcaacctgttcggaattttgtcacagaactatcagtcacgatagtgagaagttaacaagaatatgcccttaaagttcagcgtttgtattgatagcgcgagattgctgagccggtttttcaagatatactttcgggaaattgtttatcaggtgaatttttatacctttgcaagatactgatgaaaggttcaaagttttaaaatatggagataaaaaaagtaatttcggataaaaaagagttcctggaactgttgcttttggctgatgaacaggagagtatgatcgaccgctatctggaacgcggcgatatgttcgtcctgtatgataacggactgaaagcgtgctgtgtcgtaacccgtgaaggggaagggatttatgaaatcaagaacatagctacgatctcttttttccagcggcagggatatggaaaacgcttgattcaatttttatttgaacattatcgggggaaatgctctgaaatgctggtcggtacaggcgatgcaccttctacgctttctttctacgaacattgtggcttcaccatttcccatcggctaaagaatttctttaccgacaattacgaccatcctatgtacgaagacggcaagcaactggtggatatggtatatctgaaaaagacattttagtatttgctttgtgatggagatggatatagaccggttggtgaaagagtatggaaacatgatttccacgattgcctgccgaatgattcagaataaagaaatcgctcgcgaagcggcacaggaagtctggtatgaactatgcaaaagttatcatcaatttaaaggcgattcggaattttccacatggatatacactattgcccgtcgtacaatcggcagatatgcggcaagggaaagacagatgaaaatgtcggaggctgaatatttccgttcgttgcccgatatcgagtattccggtgcggaagaggcgaagcgggaatggataaaagaaaggtgcgactggtgtttgacagctttaaatcattgtctgaataatgatgcccggctgatcttcatcttcagagaaaatgtaggtttgccctatcggcaaatcagtgaggtcatggagctgaaagaaagtaatgtacggcaaatctataaccgttcgattcagaaaatcactctttttatgaatgatacctgtccgttgtataatcccgacggtgcctgtaaatgccgtatttgtaaaccggtgcattccattgatatggataaggaatacacaatgatgcagcgaatgatgaggcttgccgacttgtatctgaagtttgaaaaagaacttccgaggaaaaattattgggagaaattcttgctgtaagttgtcacaaacttcttctgtctttccactaactatatgtattatttaaaaacatatagttatgagtaaaattgattttttaaaggagcagcttatagaagcccgcacatttgtgaatcgtctaatgtcagagttgccggaagatttgtggtatactattcccgaaggtacagattccaatttcgtctggcaggcagggcatttgctcgtttcgcagaattttcatacgatgactgctgttacaggtgtgaatgagagagtagggaggttaataccgattaaagaatacaatcggctgtttaatggcatgggaactttgcatcgttccatcgagaaggatttaattcctgttacagtattgaaaaagcagttggagactgttcatcaaatctgtattgaaaatctagaaacgttgcatgatgatgtattggcagaattcttggaacctcttccgtttaaacatcctgtggcagaaataaaatatgaggcattggcatggagctataaacatgaaatgtggcatagtgcagaaatggaagctatcaaaagagatttaggttatccgattgtgtggatgaaataatagaactgtatgtttatattatcaatggaagaacccataatattgatagtttcttcatctgaaaagagaggtctattattcttacatttattatttccgttgttaataaacgcagtttccgtttctaataaactttttgcacgtttattagaaacggtatccgagtttattaaaaactattttttgagttttggaagaaaatataaaataaattaagcggaaatataaacaaaatggggcaataatcatccgactattgccccatatcatggttgctctgatataaagatatatcagtttacgtgtatgttatgtatctatttttctaataatactcatcctttttctatttttctttcctcaaagatacaacattaaaagccgtttgtcaagtgtttcataagaaaagcgggttattcatcgaatagctctgattttatttataaatcatatacggttacagctatttctttggtgataagttcttctttgagtaaatacaaatttgattataattaaagcgtgaataaataaaattaaataattgattaatattattgatataatggtttgttttattcgaacttatctctacttttgcatcataaatgaagatgatatgaatgaagtaaagaaacggttaccattgcaatgtccatcctgtgatgctccattgaaagtaggacggttgttttgtgaagaatgcaatacggaagtttgtggcaattttgaattgcctttattggcgcgcctgtcggagaaagagcagcaatttgttcttgattttgtaaagtcgagcggcagtttgaaagatatggcaaagaacataggagtcagctaccctacagttcggaatatgttggacgatataatagataaactaactaaaatggatatgtgatgaaaaacaaagtaaaattaatagtgaatccgtttattcggattgcaggtggtcaagcgttgatatggggctttctaggcttaatagtatctactttattatgttggatatcgggttatcattatcatggtttgcttcattttggaccggcccccaatccggcttggtggtgttatttggcggagcatctgattgtgtggctgattcctgcactgctcttttatttgggaggtctttttctgtctcattcccgtattcgtgtgatagatgtgctgggtactgttttgtttgctcagctgccgttgcttggaatgaatctgatcagcctgttgccggccatgcggatgatgtcgcaaatgaacatgaatatgtctcccgaagaaatgctggcacagccttattttgtcctggcaatgattcttacactgttgggattgccgtttctgatacttactttgatttggatgttcaatgctttaaaagtgtcttgtaacttgaaacaatggaagttatggacagtcgcacttataggaattattggtggtgacgtcttgtgccgattgttgatagaatggttgtattaatggtctaaaatatagtgacactatcccgacgcgatagtgtcactatgtctctgtgatagtgtcactataacgagcggatagtgacactatttttaatcatggtaattactacaccataattaattttactcattaaaccagtctatcttcttggagaaatacattaccatggccagaatgataaatagtcccagactgcctgctaataatgcaaaggtttccagttgaatcaaaacgaagatataaaggtagagtacacttaatagtccggacatgatcaatgacggtttcttctttttggtgattcccaacatatatccgccaactaatataatagtcagtgctgcagataacaaataagcagggttaaagccgatatgttcggagaaggagagcagcagactatagaacaggcagagtgctaaacctaccagcaaatactgtaacgcatgaatacgggttttattcatgatttcagtgaagaaaatgacgccgaacgtcagcagaataatcagaatagcatatttagctgaacgcatggactgctgatactgctctaccggtatcttgaagttaacgccgaaactggagttctcaatatccttgatattggtattgttgtaattcaccatgacctgcgaatagttgcggttcagattcagtacctgccactgtgccgagaattctttttctgtaatctcgcggttgttgggcaagtagtttcctgtaaaacttggagtattccagttggctttcaaatcaacacgggtcgttttacccagtgggataaagttgatggactgcgaacctttcagcttgattttaatctcataaggcagtttcttgttcttcttcagatcggataagtcggtaatggcatgtactcccgtagcgcctatccctctgttatccattcccggttcaaagacgtaaacagaatctcccagcgtgatactgatctgctcgctgatgccccgcatatccgtcaggttcaggcagatggcagctctgtcaaattgcagttgttccatatccaccctgctttttatcagctcttcgggactgaatgaacctttcaaagtcagttccgactgatacacgttcacttcataaatacttcttttgagtatttcggttttcaattgtccattgaccagaagttcgtccggaaacaagaaaaggtccttgattgataccttcttttccccgttgttctctgtcgttaccggatactggatattcagatagggaccggtaatggtttgtgcaagactccatttctcgcttacttcattaatagcttcttcctgcgtacgtccccgctcggaaataagatcttcgatcatgaacatcggtatcatcagaagaatgattaatcctccgataatgatgaccttgattgttttagagaagcggcggaggcatcccagcggttgttgttcctgcacttgctcagttgatttttcattgaaaccgtccataagataatagtgtttagtgaattattatgttgactttagaaaattctccagggcttcaatatgagatttgaaggcttctctgccttgttttgtggcccggaaaaccgttcgtggttttcgtcctacaaagcctttgctgcattcgatgtagccgagttcttccagcgcacgggtatggctggcaaggttgccgtccgtcagtgagagttgttctttcagaaaattgaaatcagcttcctcattgaccatcagaacagccataatccctagccggaccttgctctcgaatgccttatttatattttgaaatgcttctatcatttatgactgctttctttcgtaatgtaaatagaacagtattccatagaggatatgaaatccaccgaaacctatcgtccagaacagtaaggcgtggccttcccaaaaactatctatgactcccagacagataaaagcgtatcccaaccaagctatattggcataggtaaatttagaaacattgaccaaagtcagtccatagaataaaagcatgaccgaggataaaatgtcataatatccatgtagcagcagagaaatgcataaagcgcctccggtcagcatcggaagtgaaaaattccataatgcccgataggtcagcttgctgaaaaacttttgtcgcagctttttggacttgttgtaagacagtatgccggcagtgacggcggcagctgccaatacaaggatggccactataatcatcagcttcaaggctgtgattaatgttgtgtccggggtaacaaggcatgtggcgatgtatgtacccgctagtgcgtaaactccggccatgatagccgctaatccactgatcgagataaacttggaggacttttccatcaactcttttatctcatttactgattctaatgctttatctttattcatataaaaagtactttgtgctgcaaagtaaaataaaagatttcagatgaacaaagattctgctcatttattttgaaaattagagattagtgtgggtgaatggaacaatttatatagtcgttttatatgaaattagtcaaacgtttgactaatctggtagaaatacatacctttgcgcccgaaaaaggtaaaaagtacttttatgataagagaaggagcagagtttagagaactcatgctacaggttttccgtacccgcatggcttttcgtaggtcgatgcagcggacactgagaaagaacaacgcaggtatcacattcgaaatgcttcaggtactgagctgtttatggcatgaacaaggcattagccagcaaatattggctgaacgtatcgcaaaagacaaagcatgtctgaccaatctgatgaacaatctggagaagaaagggtatgtccaccggaaggaagatccggcagaccgccgcaacaaactggtttatctgactccggaaggagaggagtttaaggaacagattcgtcccatactggatcaggtttatgtatacgcagaacaggtgattggcatagaaagcattgaactcatgttatcggaattaaagggagtatacgatgttcttgaaaacgtatagggtatatctgatggggccgctctgcctgatgttcgccggtcagccggcaaaggcgcagacggattctttatttctttccgtagaccagcttttcgaacggggggtgcagcatagtttgcagcttcaggcggatgcgctcaaagaagccatggcgcaagaacggacacggacggcacgcacatcatcactgcccgatctgcaagtgggattgaaaggaggttttgtgggacagccggtcgtttgggaacggggattgtccggcccgacatatccggatattccggactggtcgcagaattacgccatcgacttttcccaaccactgtatcaaggtggcaagattcggaggactatccgtaaggcagagatggaaaaacaagttgccgagttgcagacattgacagaccaggcggaaatcaaacttggtttgctgaaccaatacatgaatctgttcagccttttcaagcagcatgagatattgatgcggaacattgaggaatccgaattacgcctgcgggatattcgccggatgaaaaaggagggggtgataacgaataatgatgtattgcgcagcgagatgcagttgacgaacgaccgtttgtctttgcaggaaacggaaaatagcatcgtacttgtgtcgcagcagctggatattttattgggacagaatgagaacctgttactaaaaccggatacgaccctactgcatcaggcagttgctctggaagcgtatgacgactatatcacccttgcttacacaaatgatccggcaatgaaattgctcagaaaacaaacggaacttgcccggaacgagatccggttggctcagtcgttgtctcttcccagcatatcgctgtatgcctcaaatacactggcacgccctgtttcgcgtacattgacggatatgtacaacaataactggaatgtaggactgtcggtttcttatcctttatcctcaatctacaaaaacagtcataaaataaaggaaagcaaactgatggtgtctttgcgtaagaatgatgaagagcagaagatgcagagaatccgtatggatgtgcgcactgcttttctgcggcatcaggaagctttgcaacgggtagaagccttacagttgtctgtccggcaggcgcaggagaactatcgtattatgcagaaccgttatctgaatcagttggctattctgactgacttgctggatgccaactctgtccgtttgaatgtagagttgcagctggtcactgcccgcactcgtgtgatttatacttattatcaacttcagaaggcttgtggtcgtctataatatatcaaggttatggcaacattaaaggaaaaaaaacggaaacttaaaaaaatgagagctcgcaacatcatcttgaatatggtgtgtgtatgtttggctgtctccgggctctggtggactattacttatttttggcgttacattagctatgaagtgaccaatgatgcttttgtagaccaatatgttgcccctttaaatatacgtgcttcgggatatatcaaggatatccgtttcaaggaacatcaatatgtgcgtcagggagataccttgttagtactcgataaccgtgaatatcaaattaaagtgaaggaagccgaagcagctctgctggatgcgcacggtttgcaggatgttcttcactcgggcatcgaaacttcccatactaatatagccgtgcaggatgccaatatagctgaagcgaaggcgaagctctggcaactggaacaggactatcaccgctttgaacgtctgctgaaagaagaatcggtgccggaacaacagtacgagcagaccaaagccgcgtatgaagcagctgaggcacgctatcaggcattagtcgcacaaaaacaggctgctttgtcgcaatatgcggaaacgagtaaaaagacaaccggagttcaagccggtatcttgcgtaaagaagcggatttggatctggctaaattgaacttgtcttatacggtactcactgctccatacgatggatatatgggcaggcgtaccttagaacccggacagtatgtccagacgggacaaaccatctcttatctggtacgcaacaaggataaatggattactgctaattataaggaaacacagattgccaatatttatattggtcagcaggtgcgcgttaaagtagatgcgttgcccgggaagatttttaacggggaagtcactgctatctcggaggcaaccgggtcgaaatattctctggtccccacagacaattccgcgggaaactttgtaaaagtacaacagcgtatcccggtacggatagagctggagaatatctctactgaagaaatggcacaattaagagcgggtatgatggttgaaacagaagctttgcgcaaatgataacaatgaaagagttgggagtacccgttcgttcctgggtgcccgattggctgggtttctgttgcattttcattgttattcttccggttaccatgctgaatggttcgtataccggaagtatgctcgaagtatcgaatacgcttggaaccaattcggaagatataacgatgggatattatgcggcttcggcaggtatggccattgcttatcctattattcctaaagtgctggcagccgtttcggtcaagtttctcttgctgatagacttgctcctgcagttctttttgagttggatttgcgcccgttcgcagaatgccgatattctgattgcctgcagttttgctatcggctttctgaaaggttttctgatgttatggtttattcgttatgcacagaagattttcagtgcgaagaatatccgcagcgagttctattcttatttttatccattggtgtacgggggcggacaggcctccatgctggtcactgcgcaattggcgtatcattataactggaagtatatgtattacttcatgatgcttttgattctggtttctattctgtttgttatcatctgcttccggcataaccgcccgattaaatcggtaccgttatccgatttgcatattcgggagatgtttatcatttcggtagggttgctgatgctgatttacgtcatcaattatgggaaagttctggattggatggcttctgccaaactttgtgcttatattgtaatttctcctatactgatcgcattatttatctggattcagcaccattcgaagaatccctatgttagtcttgcccctctgtttcagcctaaagcaatcatcggatatttctatatgatgcttgttatgtttttcagtacatccaccacattattgaccaattacctgagcatcatcctgaaagtagacagcacgcatacctattctctttatatctttttgcttccggggtatgtaatcggagcttttatctgtttctggtggtttcgctggcaacgttggcgtttccggtttctgatagcgggcggaatgagttgttttgttattttctttggtattctatattttggtattgcgccgaacagtacgtatgaaatgttatatctgcccatctttttccgcggattgggtatgttgactttgattatagcctttgccctgtttgccgtagaagatttgaacccgaagtttttgttgtcgaatgctttctttctgataatcttccgttcggtactggcacctatcatggctacttctttttacagcaatatgctgtatcgtctgcaacagaaatatatatattctttgtcggagactatcacgactgccgacccgctggctgcgtcccgttatactcagtctctgaataatgcgcttgcacaaggacacagatatgatgaagcggtacagatagctatccattctctttatggaactttgcaggagtagagtctgttgcttgcactgaaagaaatattaggttatctgttggtgatatcggtcataatagctgttatctcgcgtttcattccgtttcataagacgattcgtgttacatttgccaagacgggagatgatatggtatagcatataaaaaagagtaaatcatctcaatttttcaattctttttcctatatttggctggtaatcactggagaacagattctctccggagtaggacagatctaatcttaaacacaaatttgaaatagatgaattatgatgaacagggctaccctcgtcttactattcctcttgtcggcactgccattttctttgcaagcccagatgccggacagtatcgttcgtaaattatcgggctatattgaagcagtgcagaatttcggagaaatgctgccacaggaaaaagtctatttacatttcgacaataccagttattatcagggagaccctgtttggtttcagtgttatgttgtgacatccgaactgaaccgcccgtcggatttgagtaaaaccctttatgtcgaattgttgaatccgggtggggaagtcatagcgaaacgtgtattgcctgttaggaacggccgttgccacggtagtttcgaattaacacaactacctttttattccggtttttatgaggttcgtgcctacacgaaatatatgttgaactttggagaggaggttattttctcccgggttcttccggtattcgataagcctcgggtggctggtgattttaaagagaagaacatacagaaatatgctgtttataaatatccgcaggtacggaaaaaaacggctaaggagaaaaaagtcaatctgaagttttttcctgaaggaggaaatttggtcgaaggcattccttcccgcgttgcttttgaggcaacggatgcctatggaaatccgatcgcactgtccggaacggttatcaaccgggaaaagaaagaaatcgcctcctttgccactgtacacgaaggacgtggcacctttgtgtatactcctacgaacggagaaaatcataaggctgaggtggagttgaatggcaaaaagtaccgttttgatttgccggaagcccggttgcagggatatgtcttgcaggttgacaatctttcttcggaagacagtatagcagtcagtgtacaaaagaatccgcatacgccggagtctgtcttaggtttagctgtgcttggtcatgggaaactgcttaattattgcctgttgaacatccggaaaaatacgcctgtctctttcaaacttgacaagacggaatggaaggcaggggtggtacagatcgtattgtttgatacggcaggacagattattgccgaccgccttatctttatgagaaaaccggagccattgacaatcagtgtccggaaaaacaaagaggattatcagccgtttgatcgtgtcttattggacttttcagtacgtgacacggcgggtaagcctgtatccgctccgatgtcggtatctgtgcgtgacggatgggaagaagtggaaagccggcattctatgttagcggacttattgttaatgtctgagattaaaggctacgttcatcgtccgctctattatttcgaagcggatgataaagagcacagaacagctttggatcatttgttgttggtgcagggatggaggcgttatgcatggaaatacgagtcgggggtagaaccgtttgaaatgaagtacatgcccgaacaagggattgaagtgcatggacaagtcgtttcatttgttagaggtaagccaaaaccaaatatacaagtctcttcttttctggcgaagcggggagatgaggaaacttcgccgggggcgctttctcttaacctgtttgaaacagacagtgtggggcgttttgcttttattaccgatattattggcaagtggaatctgattctttctgtgatggagaaaggtaagcggaaagaccaccggattgtattagacagagtcttcagtcctcaacctacacaatatccgctgggagaaatgcagataagcctgtccggcagagataaaccgggagcagaacaggaactgcagacagatactgtgattggtgatgatatcgattataatcgttttatggatgcttatgaagattctctgtcaaaacggggtatgagagagaaaaatcaccgtttggatgaagtagtggtgaaggctaagaaatggagtcgtgagaaggatatttatgaaaatcgttcgaaatcggttgcttactacgatgtaccttcggagatggatgatattttggataagggaggttatatcggtgaagatatccacgagctgcttgtccgtatgaatcccaatttcatacgcaggtatagtggtggtgaggaatggttgcagtacaaaggtcgctctcccttgtatgtggtaaactataaacgaacggaggctactgaaatagatcagacccgataccggacacttcgcctggtggctatcaagtctatttatatcaatgaggaattatcggcaaggtgtcgttatgctgacatccgtatgtctccgatggatgtagatgaaatatatagctgtgctgtttttattgaaacctatccggaaggagagattcccgtaaaaggaggcaggggagtcagaaaaacctggttggatggctatagcgaacctgtagagttttatcatcccgattattctgttcttcccaaagaagaggactatcgccgtacgttatactggaacccggaagtgatgccggatgaagcagggaatgctcaggtgaggttctataacaacagccgttgccgcaggttgaaaataacggctgaaatgatttctgcggatggggctattggcatgtttaacgagtgatataaaaaggagggtgttttgatacaccctccccataaccgtaatatttcctttgatggtgaaacgcttataacgtaactcctgttttaaagatggcaatttcgcgataacctttcttctcgttattaacgaactcaccgcttgctactttaatcacatactcgataaagcgttcgcaagtcttttccatcggttcgttctcaacgatgactccggcattgaaatcaatccaccccggtttgtttttagccaaagtagaattggtggaaatcttcatcgtcggaacgaaagtaccgaaaggagtaccacgtccggtggtaaagagtaccatatggcatccgcttgcggcaagggtagtagcggctaccaggtcattgcccggggcggaaagcaggttcagtcctttcttttgcagacgttctccgtaaggcatcacaccggatacatagcttttgccacatttttgtgtacatcccagtgctttttcttccagagtggagataccgccggctttatttcccggagatggattttcacccacaggctcgccatgtgacaggaaatattctttgaagtcattgatcaagtgtacggtctgttcgaacaggtctttgttctcgcaacggttcatcagaattgtttccgcaccaaacatttccggaacttcagtcagcacgcttgtaccgccttgtgcaatcaggaagtctgagaacatacccagcaacggattggcagtgatacctgagaaaccgtcggaaccaccacatttcagtccgacacgaagttctgacaaaggtacttccgtacgttcatctttggatgctttggcatataagtcacgcagaatatccattccttcttcgtattcgtcacctactttctgggttaccatgaatttcacacggtcctggtcatagtctcctaagaattcacggaatacgtccggctggttgttttcgcatcccaagcctactaccagcactgcgcctgcattcgggtgaagtaccatatcgcgaagaatctttttcgtgttttcgtgatcgtcgccgagctgtgagcaaccgtagttgtgtgggaaagccacgatggcatctaccccttttccttccgtttcacggcgaagaccttcggccagttgtccgatgataccattaacgcaacctacagtcgggataatccagatttcatttcttacgccgacatcaccattcttacggcggtagcctttaaaagtaaggtctttatgagggatgtccagagtaacctgagtcggatggtaggtgtactctaacagtccggcaaggttcgtcttgatattcgtttcattcatccagtctccctgtttctttgtcatacgggcatgaccgatagggtagccgtacttgattacgttctcgccttctgcaaaatcttttaatgcaaacttatgtccagcgggaatgtcttcgtttagtgtgatctctattccatctacggatagatgctctcctgccgggaggttaacaatggcaacggcaacgttgtcggcaggattaattcttaaatactttgtttccatgtacttgtttagttggattttgttgttatttgctatggtaatagtctattgtctctacagtcaacaagtcaatcggcatatagttgatgcaagtcacgtctttcttgaaaatgaggtgatcgcagagcgccttgataccgttgaggccttgcagttccggttgctgggcgatgaggaaggaaacgcttccttctttcaggcaagtgacattccgttccagaaggtcatagcctatcagattgaaatctttctttccgcgactttgcaggtattcgccgacaatgtagacttttgaattgaaagtgattccattctttacgttcgggtgagaacggaagaattcatccagcatttcgttatcttcatcattgcgctcggcatgcaagtcaagctccagtatagtacaagacggatgatgttcctccatgtactgcctgaatccgatttccctgttttcttgctggttagagccgacaattccttcatgtatcttacggaaaataacgatctccttttcgtctctggcaagcagcatcagcatacgggcggcaaagtatccgctttggcgtgagttctgaccgaagaaggcgaggggaggcacgtctttgatatttgagtctatatatatataaggtatatccaacgtttgcaactgatcggtaaagcctttcgtatattgcggagccgtaggggccaccatcactccatccggttgctgagtcaggatagcttcgctggcgtctacaaacgaatgatagtcgtatggatcgtaatagttgatctttaccgaggtattgaagtccgagtaggtagcgatagcttcgtggatacctagttctactgctgtccagtattcgccttccaggtgttgaggcagaagacagatgaatgtgtacttcttgttggaagccagggcactggcatacatgttaggttgatagtcaagctgcttcagaatttcttccacccgttttttgcttgcttctgatactccgctgcgtccgtgaatgacgcggtctactgttcctacagacacgtctgctaaacgggcgatgtctttgattctgattctttcgggcaatttattcatacgatcaccttatttatataggtttatgtgctcgcacacaataataatcttaatattttcgatacaaatatataacaatttttgtaattacgaaaattgttgtatctttgtgcccgcacacgaaaggtgtgtaatgtaactctgtttatgtgttaatgctcatgtaatcagtagcttaacccataaaatagggtaaaaatgataaattgaaacttcataatattaataacttagaatttaaaacataagattatgggaaagaaagtcgttacattaggcgaaatcatgcttagattgtcaactccgggtaatacccgctttgttcagtctgactcttttgatgtagtatatggtggtggagaagcgaacgttgcagtaagctgtgccaactacggacatgaagcctatttcgtaaccaaattgccgaaacatgaaatcggacagtctgctgtaaacgcattgcgtaaatatggtgtaaagacagactttattgctcgtggtggcgaccgcgtaggtatctactatctggaaacaggcgcttctatgcgtcccagcaaggttatctatgaccgtgctcattctgctatcgctgaagctgatgctgccgactttgattttgatgctattatggaaggtgctgactggttccactggtccggtatcactccggctatttctgacaaagctgccgaactgactcgtctggcttgcgaagcagccaagcgtcatggcgtaactgtatcggttgacttgaatttccgtaagaaactgtggacaaaagaaaaagcacagtctatcatgaaaccgttgatgaagtatgtagatgtatgtatcggtaacgaagaagatgcggaactgtgtctgggcttcaaaccggatgctgacgttgaagcaggccacacagatgctgaaggctacaaaggtatcttccagcagatgatgaaagaattcggattcaaatatgttgtttctacattgcgcgaatctttctctgctactcacaatggctggaaagctatgatctacaatggcgaagaattctatacttccaaacgttatgatatcgatccgattatcgaccgtgtaggtggtggtgactctttctccggtggtattatccacggtttgatgactaaacctaaccagggcgcagctcttgaattcgctgttgctgcatctgctttgaaacacacgatcaatggtgactttaaccttgtttctgtagaagaagtggaagcattggctggtggtgacgcaagcggtcgcgtacagagataagttgagagtttgaaaacccaattcatttaaaataagaaattaagatggcaaaattcgataaaatagccgtattgaataaaatcggctctacaggtatggttcctgtattctatcacaaagatgcggaagtggcaaaaaaagtagtaaaggcttgttatgacggtggtgttcgtgctttcgaattcaccaaccgtggtgactttgcacaggaagtatttgctgaaatcgtgaaatacgcagcaaaagaatgtcctgaaatggctatcggtatcggttcaatcgttgatccggctactgctgctatgtatcttcagttaggagctaattttgtggtaggtccgttgttcaatccggaaatcgctaagatatgtaaccgtcgtctggtagcttatactccgggttgtggttctgtatctgaagtaggttttgcgcaggaagtaggttgcgatctttgcaaagtgttcccgggtgatgtatatggaactaactttgtgaaaggtttgatggctccgatgccatggtctaagctgatggtgacaggtggggtagagccttccaaggaaaacctgactgcatggatcaaagcaggcgtgttctgcgtaggtatggggtcaaaactgttcccgaaagacaaggtagcagcagaagactgggcttatgtgactgcaaaatgcgaagaagctcttggctatattgctgaggcccgcaagaaataagattagagagcgaaagctatctataaataaaaaagaggctgatgcgtcagcctcttcaaaatatgcctcaaagggttagttagtttagttagtaatgaggcatattttccattttgtttaaaggtgtttaaaggggataagtcatcggaatgagtgatcatttcggtgacttgtttttttggttgttgtaaacgtttcttttaagaatgatgtggcattcgcattttgataatccgtccgataacgagtgctgcaatgtacgccacggcaaagcctacgattgaaaaaacaaacggtttctgttcattgaaagtacggcgtggaggtacagcggtataagcctcgttggctgtagtctgattgtcagacttggtggctgctgttacttgcagtgttgtttctgttgctaccatctggcagctatctgtggttgtggttacagtatccactaatatttctgtagacatctttcttacccttttaagttatacgtaaattcctgttatggtttcaacacagtacttagggtttagttcaaagggattcttaaaatcggcgcaaaggtaactaaaaaagtgaacgatggagcatgaggagcatattcttttcaaatgatttttgggggctttctttgttgtgtgaactaatttcttagataactgttttctaaatataaaactatttagaatatggaacctcatcatcacgaacataatcatcggataacatctcttaataaagcctttataataggtatcgttctgaatatctctttcgttatagtcgagttcggagttggtttttattacgattctttgggattgctctctgatgccggacataatttgggagatgtggcaagcctgattcttgctatgttggctttccggttggagaaagtacacccgaatagtcgctatacctacggatataagaaaagtaccatcctcgtttctttactaaatgcagtcatattattggttgctgtcgggataattatcgctgaaagcatagacaagctgtttcatccggtctcagttgacggttccgccattgcctggactgccggagtaggagtggtgatcaacgcacttactgcctggctttttatgaaggataaggataaagacctgaatgtaaaaggagcctacctgcatatggcagctgacgcactggtctctgtcggagtagttgcttccggtattattatcatgtatacgggatggagcattatcgatccgattatcggattgggtatcgctgtgattattattgtttctacttggggattacttcatgacagtcttcgattatcgctggatggtgttccggtgggaatcgatactcagcagattcagcaactgatagtggaacagccgggggtagaaagctgtcatcatctgcatatttgggccattagtactacggaaacggctttgactgcacacgttgtagtggatgatatagcaaaaatggaggaaataaaacatcgtataaaggaggcgcttgaagcagcaggtatccatcatgctacattagagatagagggcgaggaagtgacttgtagcacagaatgttgtgaggattgaaataaatccgtacctttgcgcccttaaactaactaacctttaaaaaacatgtttactgacttattgcattcctcttatttctcgctctttctgatagtagcgttgggatttatgttaggaagaattaagattaaggggctatcgcttgatgtgtcagcggtgatctttattgctcttctttttggacactttggtgttattattcctaaagaattaggaaacttcggtttggtactttttatttttaccatcggtattcaggctggtcccggattcttcgactctttccgtagtaaaggaaagacgctgattctcattactatgcttattatctgttctgcctgcctcacggcagtaggtttgaagtatgcgttcgatattgatacgccgagtgtagtcggattgattgcaggagctttgaccagtactccgggattggcggtagcaattgatagtacccactctccgttagcatccattgcttacggtatcgcttatccgtttggtgtaatcggagtgattttgtttgtgaagctgcttcccaaaatcatgcgtgtaaatttggaccaggaagcccgtcgccttgaaatagagcgccgcggacaatttccggagttgggcacttgtatctaccgtgtcactaatgcaagcgtattcaaccgtagcttgatgcagatcaatgcacgggcaatgacaggtgctgttatttcccgtctgaaacataaagatgaaatatccatccccaccgcgcatacagtattgcacgaaggagactatattcaggcagtaggcagtgaggaatcattgaatcagctgtctgtattaattggcgaacgtgaagaaggcgaacttcctttggataaaacacaggaaatcgagtccttactattgaccaagaaagatatgatcaataagcaactgggtgatctgaatttacagaaaaacttcggttgtacggtgacccgtgttcgtcgaagcggtattgacttatctccgtcaccggatttggctttgaagtttggtgataaactgatggtggtaggagagaaggaaggcatcaaaggagtagcccgcctactgggaaacaatgcgaagaaactttccgatactgatttcttccccatcgcgatgggtattgtgctgggggtcttatttggtaagttgaatatttctttctccgatacactgtcgttttcacctggattgaccggaggagtattgatggtggcgttggttttgagtgccgttggtaagacagggcctatcatttggtctatgtccggccccgccaatcaactgttgcggcagttaggtctgttgcttttccttgctgaagtcggaacctctgccggaaagaaccttgtggctacttttcaggaaagcggattactgatgttcggagtgggtgcagctatcacagtagtaccgatgctggttgcggtaattgtaggacgcttggtattcaagatcaacatacttgatctactgggaaccattacgggaggtatgaccagtactccgggactggctgctgccgattcgatggtagacagtaatattccaagcgtggcatacgcgaccgtttatccgattgctatggtattccttattttatttatacaggtgatatcttcagctgtgtattaatgaaaatcagtatatataggtattgattgttaaaataatagtttgtatctttgccgcctcaaaatttaagatgaggtgaaacgattgtcattgaatatcatgcgctgtttcttgccggtactgtttgtatcgtatttggtaagtatcacattctttgctcacatacacgtggtcaatggcgtgacaatcgtccattcgcatcctttcaagaaaggggcggcacataagcactcaacagtcgaactgttattagttcatttcctgtcacatctgacaacggacggtgcggctgttgtgtttgctctctctctttttattccattcctcttgtggcggttgcatggtattacgcagcatacgcactactattctccctatcatggggtggtggcactcagagcccctcctgctattcgtttttccgtcatttgaaccgatggtatcctgctttatggtaaagcgggaagtcctcatctgtttgttcacatcatcacttaacgaaaacgaataacaaacgaaaaatgaagaaatacatcttttcgcttgtctgcttgtgctgtgcattgttgcctgccctcgaaggacaagctgctctccatgagcatcccgaatatccggatttacgtaaatcggatgcaaacatcgtaggtcatatccttgataaaaacaccaaagaacacctgccttatattactgtggcattgaaaggtacaacgatcggtactgtgaccgatgctaccggacactactttttgaagaacctccccgaaggtaacttcgtgcttgaagtcagctcagtaggttataaaaccgtaagacgcaatgtaacactgaagaaaggccgtacgctggaagaagattttgaaatagaagaagatgcggttgccttggacggcgtagttgtttccgccaatcgtaacgagaccacccgtcgtttagcgcctactttggtgaatgtagtcgatatgaaaatgtttgaaacgaccaactccactactctggcacagggattgagctttcagccgggagtacgcgtagaatccaactgtcagaattgtggtttccagcaagtacgtattaacggtttggatggtccttatacacaaatcttgcttgattcccgtccgattttcagtgcactttcgggtgtatatggcattgagcagattcctgccagcatgatagagcgtgtggaagtaatgcgtggaggcggttcagctttgttcgggtcgtctgccattgccggtacaatcaatattattactaaagagccgattcgcaattcaggaatgttgtctcataccattaccggtattggagatggagacgctttcgataataatactgctttgaatgcctctcttgtaacggacgatcagcgtgccggtttatatatctttggtcagaaccgccaccgttcggcatacgaccatgatggagacggatattctgaaataccgaaaatacatggccagacaatcggtttccgttccttcctgaaaacgactacttattcaaaactgactttcgaatatcatcatatggaagaattccgcaggggaggagacttactgaaccgtccgcctcatgaagcgaatgtggccgaacagacagaacattccatcaatggcggtggattgaaatatgactatttctcaccaaacgagaagcaccgttttaatgtgtttgcatccgcacaacacatcaatcgtgacagctattatggtggcgggcaggatctgaatgcttacggaaacactaccgacctgaactggatggcaggatcacaatatgtctacagcttcggaaaatgtatttttatgccttcggacctgactgccggaatcgaattcaaccaggataagctggaagacaatatgtggggatatcaccgcacggtagatcaaaaagtaaatatcggtagcgctttcctgcaaaatgaatggaagaacgatcattggggattcttgcttggcggtcgtctggataagcataacctgattgatcatattatattcagcccgcgtgctaacctgcgtttcaatcctacccaaaatattaacctgcgtttgagctattcttccggtttccgtgcaccgcaggcttttgatgaagatttgcatgtggagaacgtaggtggaaatgtggcaatggttgagcttgcaaaggatctgaaagaggaaagatcacagagcttaagtgcttcagcagatatttaccaccgtttcggtgcattccagattaactttttggtggaagggttctatactaaattgtcggatgtctttgcattgactgatggcgaagtaaaagacggaattctgacacgtacacgctataatgctcccggagcacgtgtgatgggactgacactggaaggaaagatggcttatctgaataaattccagatccaggctggggctactttgcagcagagccattacagcgaaccgcacgtgtggaacaaagaagctccggcagtaaagaagatgatgcgtaccccgaatacttacggctattttacagctacttatactccggtcaaaccgttgtctatcgccctttccggtacctatacgggttcgatgctgatacctcacgaacctgttcccggattcctcgacaaaccgattacggtcaatacggaagacttcttcgatatcgctctgaaggcggcatacgacttcaaactctataagtcgatgaacttgcaggtgaatgccggaatacagaatatcttcaatgcttatcagaatgactttgataagggagccgaccgtgattcgggctatatttatggcccttcactgccgagaagtttctttgctggagtgaaaattagctattaataatggtttaataatctttttagcttataaatccttataaatggggattgtttcggaaccggacaatccctatctttgccgcagaagataaaccttatcttcgctgcacaaaaactgacgaatgaaacaaatatacctgaatataatgaagtggtttttgcctgtactgtttatttcgtacatggcagggattactttgtttactcactcccatgtggtaaacggggttacgattgttcattcacatccctttaagaaaggtggcgaacatagccatacgacagtagagtttcagctgattcacatattggaccatacattggtgacagataatggtttgacacctttgtttgtgacttctgtcctgtctcttttatgtatttttctcgcctctccgcagcgtatgcggtattgtcgtccctgtccgggcgccatttctctcagagcgcctcctgtcgtttagtctgcatcacgtagaagcaggcaggtcttctttggaaactgctgttgcttcccatccttattatttttgatttaaaacattaaaagactaacgacaatgaaaaaatatcttttagtcctggtcagcctatgttgtgccttgttgcctgcattggctgaacatccggagtatccggaattgaaaaaatctgatgcgaatataattggtcatgtattggataaaaagacaagtgagcatctgccttatattaccatagcattaaagggaaccactataggaaccgtcaccgacgctaccggacactacttcctgaagaatctgccggaaggaaactttatgatggaagtcagctcggtagggtataagacggttacccgtagtgtgaccttgaaaaaaggtaaaacgctggaagagaactttgaactggaagaagatgcgattgctctggacggagtagtcgtctctgccaaccgtagtgaaacgacccgacgtctggcaccgactctggtcaatgtagtagatttgaaactgtttgaaaccactaattcttctacattatcacagggcttgaattttcagcctggtgtccgtgtagagactaactgtcagaattgtgggtttcagcaagtccggatcaatgggctggacggcccctatacacagatactcatcgactcccgtcccgtgttcagtgccctttccggggtatacgggctggagcagattcctgccagcatgatcgaacgtgtagaagtcatgcgcgggggtggatcggcattgttcggctcttcggccattgcgggaacgatcaatatcattacgaaggagcctctgcgaaattccggtcagttatcgcatacgatcacttccattggtggcagttccgcattcgataacaacacctcgctgaatgcttcccttgtaacggacgatcatcgtgccggattgtatatcttcgggcagaaccgtcatcggtcgggatatgattatgacggagacggatttacggaacttccgaaactgaagaatcagacggtcggtttccgttcttatctgaaaacgagtacttactccaaactaacgtttgaataccatcatatgcaggaattccgccgtggtggagatatgctggatcgtcctcctcacgaagcccatattgccgagcagttacaacactccatagatggcggaagtctgaaatacgattatttctcaccgaatgaaaagaatcgtttaagtgtttttgcctcggcagccaatacggatcgtgacagttattatggtcccggcaacgatcctctgaaagcatacggaaagacgaccgacctcaccgctatgggcggtgtgcaatatgtgcacacattcgacaaatgtcttttcatgccttccgacctgacagcgggactcgaatataaccgtgaccggctgaaagataatatgtggggatacgaccgccatacggaccagacggtcaaggtttacagtgcttttctacagaacgaatggaaaaacaaacattggggaattttgattggcgggcgtctggataagcacaatatggtggatgatgttattttcagcccgcgtgccaacctgcgtttcaatcctacggataatatcaatctgcgtttgagctattcttccggcttccgcgccccacaggcatttgacgaagatatgcatatcgaaaatgtaggtggaacagtggcgatgatcgagcgtgcaaaggacttgaaagaggaaaaatcgcagagcttcagtgcatccgcagatatgtatcaccgctttggtgcttttcagactaatctgttagtagaaggattttatacgaggctgactgatgtgttcgtgttaggagggccttttgaccgtggtgacggtgtgctggtgaaaatacgcagcaatggtccgggagccaaagtaatgggattgactctggaaggaaagattgcttatctttctttgcttcaaatacaggcaggactgacattgcagcgcagccgatacgatgaaccgcataaatggcacgatgatgcgccggcagaaagaaaaatcttccgtactcccgatatctacggttattttacggctacttatactcccgtcaaaccgttgtccattgctctctcgggtacatataccggcagtatgcttgtgcagcgtatggacatcagcgcagaaaacgtagcaatgggcgatatgcccgagcgaaaggcggaagccatccgtacaccccggttcttcgatatgggagtgaagatagcgtatgacttcaaactctataaaacggtagacttacaacttagcggaggtgttcagaatatctttgaagcatatcagaaagacttcgacagaggagctaaccgggattccaactatatctacggtccttcgcttccgagaagtttctttgccggagtgaagattagttattgatacgataccggtctgttattttcagaacattttatgcatccgggaatgtgataaaacgattgcttcccggatgttttataaataagcgacagatttggcattgatgatttcaacgataatcatgtctgcctgaccgatttttagtatttttggcgattgtaagtaagcgattcaaagtcttatcagattgtattacggattatgataaaaagaagatggacgaaatgcttcattattacgaatgtaaaggcagtaaaataattagtttgaatgacctattatggcaacagaaaataaaataaagtattttgaaaatcgggaagactggagaaagtggctgatggacaactttgaaaccgaagacgaaatttggtttgtatttcctcttaaatcgtcaggtgaaaaaagtattgcatacaacgatgctgttgaagaagccctttgtttcgaatggattgacagtacgataaaaccgcttgataaagaacatagaattcagcgtttcacgcctagaaaacctaaaagtacatactcgcaagccaacaaagaaagacttaaatggttattggcaaataaaatgatacaccctgaatttgaagataaaatacgcacagttttatctgacccttttatttttcccaatgacataatggacagattgaaagaagatgaaatagcatggagaaactaccggcatttttccgacgcatataagcgtatccgaattgcatacattgaagcagcaaggaagcgaccggaagaatttgaaaagcgattaaacaactttatctgtaaagtgaaagagaataagatgataaccggatttggcggaatagagaaatattattgagattgtccgaatctttatggaagaatatccttatagtctgatggaagcgatggagcatcattagtagtaaatcactaaaaacttttctttcccttttagtagtttgcctgtttgagttgtattatatatagatagtcaataaaagtcaaagtaatcaacttattaaacagttaaccttatgttcaaacaactaagtacttctctactgattgcatcagcatgtattttgtcctcttgcacgcctacggtgaagcaggagatcgcaattttacctacccccgttagtttgacggaacagtcgggtgccttcgtcttaaaggatggaatgaaaatcggcgtttccgatcagtccttatttccggctgccggatatttgcaggatattcttcggaatgtggtgtctacttctgtagaggtgaccgaagccgataaggcggatatctatctccagctagggcaggataatggaaagcccggctcttacaaacttcaggctacccccaagtctgttcaggttgaagccggagattattcgggtatcgtttccgccattgccagcctccaccaactgctgcctgccggaatagaagtgcagggaacgaaacagactttctccattcctgccgtgcaaatagaggactcgccgcgctttgaatggcgtggttttatgctggatgcttcccgtcacttctggaataaagatgaagtgaaacatgtgctggatctgatgtccttatataaactgaataagttccactggcatctgacggatgatcagggatggcggatcgaaatcgagaaatatccgttgctgacggaaaaaggagcgtggcgtaaatttaacaagcacgaccgtggttgtatggagcgtgcggtagaagaggacaataccgacttcctgattccggaaaacaaaatacggattgtagaaggagatactctgtatggtggttactatacgcacgaagatattaaagaaattgtagattatgctgcacagagaggtattgatgtgattccggaaatagatatgccgggacatttcctggctgctatcacccaatacccggatctcgcttgtgacggactgatcggctggggagaaacattctcttctcctatttgtccgggaaaggatacgacgctggaattctgtcaggatgtctttaaagagattttcgatctctttccttatgaatatgtacacatggggggtgacgaagtcgagaaaaataactggaaaaagtgcccccgttgccagaagcgaatccgcacggaaggacttaaatcggtagaagatttgcaggcatggtttgtgcgtgatatggagaaattcttccttgccaatggaaagaagttgataggctgggatgaagttgttgccgacggactgacttcggatgctgctattacctggtggagaagttggtcgaaagaggcagtgcctatggccacttcgcaaggacaaagagtgattgcctgcccgaatgaatatttctattttgattatgcgcaggataaaaactccgtgaagaagatattggcatacgatccgtatgcagacgaccgcttgtcacccgaacagaaagaatgtttctggggcgtgcaggctaatctctgggcagaatggattccgtctatgaaacgtatcgaatatctgatacttccccgtatggtggcgttgagtgaaatagcctgggtgcagccggaggcgaaaccggatctgaaagagttctatcgtcagcttgttccgcatttcaagcggatggatatccttggattgaactaccgggtacccgatctggaaggattctacaaagtgaatgctttccttgatgaggcttcggttgatctgacttgtccgttgccgggcattgaagtccgttatactactgacggaagtatgccgactaagcaatccactctttatgaaggaaatctgaaagtgacggaaacgacagattttactttccgcactttccgtcccgacggtactccatcggatgtagcacgtacccgatacgtcaaagctccttatgcggaggcaactgctgctccggcttctttgaattccggactgaaagccgtatggcataaattccgtggtaatctttgtgcggatatcgatgcggctcccgtgaatggtgagtatgtcgtagaatccgtttctatccccgaagaggtgaaaggagatatcggtctgatactcacgggctacctggaagtacctgctgatggcatctatacatttgcccttctttcggacgacggcagtacgctgaaactggacggagaactactgggagataatgacggagcacattcaccggtagagattatagtacagaaggccttgaaagccggactgcacccgatagaagtacgctacttcgattgcaatggcggagttttgcagatggaattagtcaatgaaaagggtgagaaagaagtgcttccgaaagaatggctgaaacatgaataaacagatcccctgaagattttttattaggtattaatatagataaggtttgatagaaggcgggtagaagtagggatacttttatccgctgtttttattctgtaggtaattcttgttgaaatatccctataaatgggtatttcccaaatcaaaagttcttctcaactttgcagagtgaataaaacgccactatgcaatatctgaaagaagacatacaggaaaaaatcctccacatagccgaagaagtattctctgaaaaaggatataaggatgcttccatgcgcgaaattgcttcccgaacagggattacagtcagcaacatctatcattatttcaccaataaggatgagatattccgcacgattctgaaacctgtgctgaatgatttgtatgtcaagatataccgacatgatgccaatcagatgtccatagaggtttttacgaattcggactatcagcaggaatccgtgcaggaatatatcgatttggtttccgaacaccgtgcccggttgcgtatgttacttttccaggcatagggatcatccctggaaaacttccgttcggagtataccgataaatgaaaaggtatgtttaccgcttgcggttgctgtcctgttgcttagcaatatcgcccagcgtaagctgagtgtgcggcagattgaagctaagattaatgccggaaaccgcttggaagaatatctgcaaggcatacgggtgatgaaagcatataatttgttgggaggcaagttcgaacgcctgaaaatggcttatagtgatctccgtcgtgcctgtatccggcaggaggcgcttctcggcccatttatcttattctcggttacattgattcgtgccggattgacattcatgatactttgcggtacgtacctgttgataggaggcgaactttcactgctcacgtttgtcatgtttctggtagtcggttcccgtgttttcgatccgttgacatctgccttgactaactttgccgagtttcgctacttctccatcgcaggaggacgtatccttacgttgatgaacgaatcggaaatgaagggaaatcgtgatgtgcccgaaagcggagatattacttttgatcatgtatctttcggctatcaggaaaaggaaatactgcatgatatttccgtgactcttagaaaagggacgctcactgctttggtcggtccttccggaagcggaaagagtacgatgctgaaactttgcgcacgcttctatgatccgcataaaggctcggttcgttttaacggaatggatatgaaagaactggagctggagtcattaatgaaacattgttccatggtttttcaggatgtctatctgttttaggatacgctgaagaataatatccgtttcggcaggacagatgctacggatgaagaaaatgaagtggaagtgcagcaagctatcaataccttgattgcggggcggacggtaatcgttatcgctcaccgcctcaaaacgatccgaaatgccgaccggattattgtgctggaagaaggacgaattgcggaacaaggcactcatgatgaacttttgagccggccggggctgtacgccaaactttggaatatacaggaacagacatcgggatggaaactataaaaacggctcatcagagataaaacgaaaaggtccggctttcacaagccgggccttttgtttactagaatttatgctatttacacttattctgtaatattgaatacattatatggtttttttaactaacaaccaaatgtgagaatgcgggagaatcacttcggccgattccaatgttttcaatgtggctacgtaattttttaattatgactaattaattcaattctgatattgcaaagataggggctttgacgatttcctgcaatcacctgaaatgggtattcttgggcgggttactagcaatatatagtggggctgaatcttttattccggaacatttgcagagtttcctgtcaacctgttcagatgacataccagtagttttccttcattatctctcaaatgcataccattgccttgacaataacggaagtatttgcatcgggcgcactcgtcttttttcatccatgaacggtcgcgataaggctggaatttcgtttgccatatttcccaaaaatcatcctgatagatatttccttgatggtagttggagcggatgctgctacaggcactgatagaaccgtcaattaaaacggagccgactgatattccggcgctacagaagaaaggagtattccgtacttcaccttcatagttacccaggaaaccttcgcagccgtaactcgcacggataattccttcctttcgggtgtcacggatgaagtcgagtacttgtttcagttcttctccgttcatacggaattccggttcttcggcggctcgtcctaccggaaagatggtagataccctccatcgtttgactccgagactgataagtaactctttcatagccggcaactgtggcaggctacggcgggtgacacaggtaatgacgtcgaatgtcagttcggggatagctgtgatttcccgtatggcatttacggcacaatcgaaactttcgggatgtcgtcgcatccagttgtgtacatccttcagtccgtccaggctgatggatatactacgcataccgctacggatcaggttgtgaagccgttcgcgcgtgagacacaggccgttgcataccatgccccacgggtatccccgtcgggatatttctttgccgcaagtttctaaatcttcacgtacggttggctctccaccggagataatgacgaatacatcgtgcggattggtatgtgttgctatgctgtccagtacttttagaaaatcctgtagaggcatatccggagtagcgggagaggacttgcagtcactgccacaatggcggcaacgtacattacatcgtaaggtgcattcccaaaaaagctgcctgagcggatgttcttccactctttcgtgtttcatccggcgaaatatttctaaagccagccatcggcggggagtaagggggatgatacgtttcattcttagtcttctttttcttcttcttttttctcctctttaagtaaagtgacttttccctcttttccaaggtcttgtattctaatcttttttgtttggtatgcaccattcttttcgccgtctacatctgtatactcaaggtacatttctgtatctttgggaggatactctttgaatttaaatgtattgattgctataccgcttaccgtataatgctctatttcacgtgactcggtataggcagtatctgtaattaatgaatcttcttgattcatataactggatactacgcgaatgccattaatagtttctttttcttcattttgtacttgactgcttattataatgtcaggagtccagacgggaccgggaccataataacaaggttcgtcccagatctcgttattattgccacatccggaaaagcctaaagcggcgagcagacttagtagatatttgtttttcatgttgttaatgtgtttagttcttgttgggacaaagataattaatctttgaattggttgttctccattgttcgttttattttttttagatgcttttccaatgcaatatacacttctttccgataactgacaaaaatagttttatctgtttggaaggaatctttctttttaccgtcatagtgcggaatattggataaaaacaggctatacgagaaaatcatgttctcctctatttggcgggaaggcttgaatgacttggcaggtatgtaagaataaataccctctttacaacggtagggtttatacatttgcacaactccccacgaattaatctcatccacccggatgcttcttttcccgaacaggcttcgttcttctattctatcctcacaaagtaaaatcttactgggtaatgcccaatagattaacaggatagacaaagatatgggcaacaagaaaataaaaaggactttattctcacttaaattggatacacataaaaagtagatcataaatgcactgaatatactgcatattgcaactcctgcccaaacaaacttatttgtagaataaatccagaatgtgtttttttccaaacttttatctttcatatttaattcaattcttttacagaatccggattgccatgtttcgtttaaatcaagctatctttcatcattattcgtagttgtttttgtgtaggtaatgttttccatcctttatctggcgcttttagagtaaaccaggatggtacggtgtctaatattcgatgtcggttgggggctttggctaagaatgttacaaaataacgggttccgattggagtgtttttactctcgttaaatgatataaaaaaacttcctttatataaagtcttattatatataaattcatattttgcgctttgtcctctataagcagaaccgtatttaataagagttactatagaatatatgccatcctttcttacattgttgtttctaattgttgagacagcatacaatagaatgaatactataatgggaactataaatttaaaaatcttggtttgattaatcagcttcattgctattctatatcctttcatttttcttcattttttattgcaactaatgtccggtggctaaccgaccgttaagacaactcatttgctcgttagtggtagttgttcattactccattcggtcaatattacattaaaatcagccaacattaaatcaaagtcatacttaaccttcttatttagtttgtttgttatatgacttaatgctgataggatatattcgcttaatctttttttttgttcagaatgattcagttcactaaattctttttcaagggttatcactgcttttacttttccagtatctgttctgaatggtccaaactcaaagcgatttcgaagataatatccattcttttcaatcccttgtttggtaaacattgttagtaatttggggtataattctttttgtctcaatttcagtttttcatcagcgataacgtaattgcatttacagcaaacatggtcgtaataactaaatgaacactttagaataattttattgacagcctgaccatacaattcaggtcgcatttgtttgtttaattttgattgtaaatcattctcaatactttcaataacaaccttagagttctcataacagttaccaattgtacgttcaatccaaatgggatttttaggaatccaatttcgttgacttctaagttctataccttgtacatcttctttcgttttatattcccatgctatggattgcctctgaaagggatcatccgggctgaaatgataacttgtccttcctgcttccatggtaaatccgtttattcttcttgaccaaatggcttcgacgaaacgaggctctctgtgtttattgacaaagcaagtcatcgggtttccattaaagaaagagcctcttaatgcctcaagggcctcattagatccccaacctatgattgccaaactctcgcaaacccgaactgcattattccactcttctacatttttgtaatccgcatatttaagaaattcagcgaataaactatctcgcaatttgtcaatatcattttgagatttcaaaaaaacttcaagttcgtttaattcttctatttcaaatattctgttcatttgttttttattttaaccgctaatgtccggcagataattgactattaaggtgctttatcagtttgttagcaatctaattcatttctatttaataattcatcaatattatgcctctaaaaatacagttttgtctgatcacccacaaaggaatttgttagttttttcctctatcctatgaaaaagcatcccttgacagtcaacaatgatctgttgcatgatatgtttgatcaggaaaaggtaaagagcgggctcgtttttatctttaccatgctaggctggtatttatccacaggatgtgcgaattgatattctcccccttttgcatatattggaaaggatatgtgtaatagcaaaaagtgtgatactttctgtgatatcctttctttttgatttgatttaaagtaattccctatcgttgtatattatagaattgcctcaaatagcggtttctcgctctcagaaagtagttcttctactcccggaccggctctcagagtgcttcagcacggggcttagtagcgtgaagagtaaggttagataaggtatattgtgcgtatagtgtaactacagcctgcaaatagcgtaactatatcctgtaaatagcgtcagtatctactccccataaatagcaaaaacagtttgtacgatatatatttctttccacaaagtccgtcttttgttattagatttttctgacttgatttaattgacggtaattttctctttccaggttataccacttatatctgtcagaattagttcgtagtcacttttgggcaagtccataaaaacatcacttctgattgtaagagttgctttacttcctaaaggaatgatgaggctgtgttttcccggagctactttggctacatagtcattttttattcgggtaagtgggaagcgggctagctcttctccattcttttgaagtattgtttttccattctcgtcttttagtgttatgccgatcaggaaggaaccgtacacgtcggctccttctatacggtatactttgaacgtgaggatatcctcttgaatctttgcattggatattttcagttccggtttgaccgatttgttgtgcaaaggtccccaaataccgttatggaagacttggttagtatataaggtcagtatgaaaagcagtactgcaccgcttattgcgactttactgaattgcttgatagatagtggaagttcaccggaagtaagccatacaagccatttgttcttggaaagttttggtaataacagataatccaaagaatattttccaccaccggacaggaaaatagtgaatccggctgacactcccaagatgccgatttgccattcgtcgaggcaggtagtgcccagccagccggagcctaaaagaatgccgaatgccagactgaatacgccgatactcattaatcgtgtgaagaaaccgagcatatagagtaacccgacgatgccttctactaatgtgaaaattaccattgcccaccaaagtaaatccggtgtgctgaccaagtattcaataatcggtttgataccaatggaattgggaaggaaatgattgaacttttctccaatgtatccggtggcatccggaatgagtttgttttcgagaacgagtctgcgccaaaaagctgaaaaataagtccagcctacgatcagtcgtaaggagagagtgaaaatgcccgcaagtacgtaggctttggatggttcttgttgttgtgtcagcatactgtttgttgttagtttgttattgagagaatcgtttcttattagaacaagtttccagtggaaaatgtttttatgaaaacctgttttttttgaaacgattctactcaagataaactacatacaaaacaaagctaacaatgcaaaagttattctttaaacggctatctttataccttcttttttattacaataccgtttgcattgttggcaaaggtcgtatcccagcatggctcccaagatgaagtcctcttcggcagacagttgattcaaggggcgaatgatgatatgccgcatggcttccatacattcgggtttgccgaaaaacagattaatcttgttagtacctacttcttgtatcatataactgatcttctgattcttcagccggcggatggcaaactcttcgtgctctctgctcatcgtatagagtaccatgttgcgtacgcctttcttgaactcataaatgtggttgaggaaaatccggatttctccgggaatgattctttcggtagccatgatgtaaactgttattttatatggagataaagattagctgatttcttgttttacttgttcaacccatgcgctgatacgttcatctgtctgaccgtcttcattgacttcgtcgagtggaagacctacgaacttgccattaacgacagcgatagaagaatcgaatgtataaccggctgtgtccaccgctccacagaatttgcagcgggtatctttcagttcttcataaagaataccgatagcatcacagaacgtatcgctgtaagaatcggaatcaccacaaccgaacaaggctacatatttgtgagacagatcgcatttctttaaaactttaataccgtcgtaccagtcatcctgcaattcaccggctccccatgtggaactgcccagtaccagtacatcatattcaccgaccaaagcttcagtgagtttggatacatcataaatatgtgcggaaggaacatctagtttctctgcaatccgacgggcaaggtcttctgttgttccggtagtggaaccataaaatactccaattttattcatctttgattctattttaatgtgatggtgcaaagatagagggtctcggagaaataggaaatccccatttatagtggaataattgctttattctcattataaatggggatagcataacgtttcggatctataaataggttaaagccaacaaacctgatataaatcttaaaatatagcagaaaacgattaatgatggaacaagcgaatgcctgtgaatgccattgccatattgtacttgtcgcatgtaccgataacatgatcatctcgtacagaacctcccggttgtgcgatatagcttacaccgcttttgtgtgcacgttcgatattgtctccgaaggggaagaatgcgtcagagcctaaagctacgccagtcattgtatccagccatgcacgtttctcttcgcgggtcaggacttccggcttttctgtaaaaaactgttgccaaacgccgtctgccaatacgtcatcatgatcttctgaaatataaacgtcgatagtattatcacgatctgcacggcggattttttcaatccaaggcagattcatcactttcggatgttggcggagataccagatatctgctttatttcctgcaaggcgcgtgcagtgaatgcgtgactgttgtcctgcaccgataccaatcgcttgtccgtcttttgcataacatacggaattggattgtgtatattttaaggtgattaaagaaatgattaggtcacgtttggcttcagctggaatttccttgttttgtgtgggcatttccttcaaaagactttcgtctattttcagttcgtttctgccttgctcaaaagtcactccgaaaacatctttgtgttcaataggagccgggcggtaagccggatctatcttgatcacattgtaagttccttttcttttatttttcaggatttccagagcttcgggagtgtaatccggtgcaatcacaccatcggatacttcacggttgataatgcgtgcagtctcttcatcacaagtatcggacaatgcgatgaagtctccgtaagaagacatacggtcggcaccacgtgcgcgtgcataggctgttgccagtggagacagttttacatcatccacaaaatagattttcttcagagtgtcactcatttctacagccacagcagcacctgccgggctgacgtgtttgaatgatgcggcagccggaagtccggtagcttcttttagttctttaactaactgccaactgttgaatgcatccagcagattgatgtaaccgggacgtccgtttaatacctcaatgggtagttcgccttctttcatgaagatacgggcaggcttttgatttgggttgcagccgtatttcagttcgagttcgtttgccatattatttaattatgaattactgattacaaattgatagcgacaaaattactaaaaaaagaatagccagcctagcctcctgttataaattagtaacaagtaattagtattggggaaactgtgagtagcgaaaatacctatttgtggtgattgcatatcctcgaaatattccgtttctttgcagtctctaatataaataggtgtaaatggataatttgcaaaaatacaaaccaactgataagatgattgatctcatcagtgataactattccttgttacaagtgatgagccgtttcggcctttcgttgggatttggcgacaaaacagtgaaagaagtttgcgagcttaatggagtagattgcaggacttttctgattgtagtcaactttatgtctgaaggtttctcacggatggatggaagcagtgaggatatttctataccagcactaatcgattatctgcggcaagcccatatttacttcctggacttttcccttcctgccattcgtcgtaaactgattgaagcgattgactgttcgcaggatgatgtagcctttctgattctcaagttctttgatgaatatacacgagaggtacgtaagcatatggattatgaggagaaaacggtattcaagtatgtggatgcgctgataaatggcaatgctccccggaattatcagattagcacattctccaaacatcacgaccaggtgggagagaagctgacagaactgaaaaatatcatcattaaatattgtcctgccaaagccaatgagaatctgttgaatgcggctcttttcgatatatacgcctgtgaggccggcttggaatctcactgcaaggttgaagactatatttttgttcctgccattctgaagctggaaaggaggattagggaaaatgaaaaataacgaagccattcgaattgcgatcgccgaaacctcagtgattatccggggtgggctgaccgctgcattgaagcgtcttcctaatgtgaaggtgcaacctatagaattactttcagtggaggctctgagtgattgcctgcgtacgcaatatccggaaatgctgattgtaaatcctacttttggtgactactttgatgtaaataagttccgggaagaaactgccggtaagaaaatacgtttgattgctttggttacctcttttgtagatgcctctttgctgactaaatatgatgagtcgatttctatctttgatgatctggatattctttctaaaaagattcatggtctgctaaatctagcttcggaagaggaggagcttgacaatcaggaaacgcttagccaacgggagaaagagatagtggtctgtgtggtgaaaggtatgacgaataaagagattgcagagaatcttttcttgtctatccatactgtcattactcaccgaaggaatatcagcaagaagctgcagatacacagtgcggctggtctgactatttatgcgattgtaaataagcttgttacgctcaatgatgtgaaagatttataaccttcaaagaatgttataaaatctgaaaccgtttgcgaacacggaatctttttgtacctttgcagtgcaattgagaaattgctattagtttaaaaggtaaaagaaaagattattaaggtattagatttaaataattaaggttttaaattttttagtattcaataggacatttttggtaaaaggtaaaaaggataacaataggtaagaagtttaaaaggtaaaaagaagattagttttcaggaattgaggtaataaaagaaaagccttcctggcttttctgatgctgcggcgagtggttcccttctaggaattgactcgttttttgtttatagacgcaggggagctgaaaggtatataaataccgggattgctaatggccgggattggtataaaacaaaatcccgacgaaatcgcttcggcgggactctatttcatttttacttaaatgtggctacgtaataaaattatgactaattaattcaattctgatactgcaaagatagtgcgtttctgtatctgtcacaatcccctttataaggtatattgcgtagctgttctcactattaatgattagtggtggatatcattttacttttttccactctttcgttgcgaaatcatatgatttgatcactttggcagggcaaccggcacaaatagagtatgccgggatggaacggctgacaacgcttccggcagccactacacaatgtttccctaaagttactcccggcagtatgacggagtttgcacctacccatacatcatcctcaatagtgacaggctgtgtacttactccttgttcgtcgattgatttctccgcatcttgatagttatgattaagtcctgtgactgttatattctgtgcaagattcacatgattccctatacgaaccggaccgataatggtatttcctaatccgatgcgggtataatctccaatgattaaatctcctaccgcattattaaggcaggaaaagtcttctactaccgaatagcgccctagcgagaactgattaaaaggaggaaggtctttgcggacactgcgataaattacggaaccttttccacgtttcagatatacaaaatagaaaaggcgtatccaccagttgggacgtgtctttacgggatgcataataaaacgatgtacggcttgtttcaaagccggattctgtttgattcgctgtttcagtgtccttttctccatattgaatatttttgtttctttttatcttctactaaataattcggtattgccagactgtatgtgattgccaatcctaaaagcaatatccaccatttgagtgacgaggtccagtggtatcctgttatcaataaagtccagatactgacgaaggtacataatttcatcggagaaggtatcagctgctgggctatacggttgcagaaattccagttgccttctaataaagacggcaatagataagagagggtcttccgtatgcgcctgcgatagggataaacaggggctgagtcacaatgtacaatcacatccggcagatattcaatatatatattctgtttgaataacttccgttcgagatttgttttggcagttctttgattcttctgtagccattctaagtcgaaagccatattggttccgaaaagacttgaagaaaagccgatctgagtattccccgatctgaaaagactgttattgatttcttcggatagagcatggaaacgtttccgtactcccttacgattattaatgatcgtgtgtaactgcattgcctgtattccggcatcgtaggcattataaatcttttccagaaaatggggtgataaagcactggctttatcagaaagaaggatgactaattcgtatcgttctttatctaatgaatcaattgcttccagcagatctttatatgtgatgaattcatatgcttcctgttggtatattgaaggaaggaggcttccgtaaggaactaatatggcacactgatattgttttctggctttgggataattggaatgtttgaaatgtgaggcaacagccaatatgaaaaggtataggagcaaaagccctatacacaaaaagaagaaatcgtctgctatgtagataaagttgtccattctgcagtgaaagagttatacgttctctttttgaacgaatgcagtaactgttttcagaatgatttttatgtccagtccgaaagagaagttttttgcatattggatatccagttgcttgcgttcttctgcggagagtttacccgcttcacctcttttttcaacctgccacagtccggtaagtccggctggtcccataaaacggtcgatatgttcatcgctggtcagtaactctgcctcatagagtgggaggggacgattgcctactatagacatatctcctttgaggatattgataagctgtggtaattcatcaatgctgtatttacggataaaacgtcctatctttgtgattctggggtcattctccagttttacgaaagcattacttttctcttttgatttcttgtgaatatagtcttcttccgaaattacaaaatcgtcggatatcaggagaatttcttcttcgtctgcttcttcagagacattggattcttctccccatatatcttcttcctcttgttcttcctgttggtattggttgagggcattgaaatccttcagatgtttatcagcgtcggtatacatcgaacggaatttgagaaaatcaaatatctgataattgcttcctacacgtttggatttatagataatcggccctttgctctccaggcgaatggctatagaagttgctattaaaagaggagaaaggaaaagtaatgctattccggaaaagaatatatcgaagattcttttccacgaaggcaagcgaaaggcatttaaattctgtgttttgagttgcagcgcttctattttttgttcttttctacgtatgagaaaagttgacagatctttcagtacttcactgttggtttcatacttaatcgtgttattaactcctgccttcaagtattctgtagcttcttccttagtaatggaatctataactagtaccatataaagccctggatacatttttcgtatagagcgaatatcggcgatatcttttgatagttctacctgctcaataaataaagctgcatcgtatttttctcgtatcttgtctagcactttagttgccttatagcagtttggtgctgcatagaatactccggtacttaatttcgaaaacagttctattgttttgttgtgtctgcctatgtaaacaaaatattgcatttaaaggctgtattagtcgataatctttttgattcggatttttagttccaaaggattgaatggcttcagaatatagtcttctgctccttcttccagtaatttgatcctttccgtggtactttcttcgctggacagcataacgatgggaattgacttgaataactcattggctttcatgtatctgaggaattcatctcctctcattagcggcatacggatatcggaaataatgagatcgggtacattaccttcattaagccaatctattgctttaataggattttccaaatacataacatcgtaatccttacctagatatatacttgcaacttttccaatagtcgctttatcgtcaactaatagtatcttttttttcatacaaatagaacctttctatcgcttgctttgctacttgatttatatagattaaattgaatctcttgtctttgtttcacttcgtgcaaatatatatataattttagaataaatttccaattagcagaagtaaaattcatggagattattatttttatttattaatagaatatatctgatacatttagtgaggaaaaaaacacggatttcattttttttatgaaatccgtgttgataagggagattagtttttatttgtttggaataccttgtttacatcaaaatcattccaccatttttcattttctgtaccaccgctcgttacccagtcgctgaattgtgaataagcagttttgatatttacatactctaaaggccatttgaaattggaaggaaccatgataccccatgccagattctctttactgatataatattttttgctgccatgatgactgttatcgttgtttccgccaaacagatcggtgtttgcgagtttggttggttgatagcctgcaacatgtatttccttacgtgggtttctgttgccgtctacgatgataaagacattcaaattgttgacattaaaagcatctgctgatattgtcggattattgaaggtaatggagaaactgatattcttaggtttggtattgcctgcatagtctgagacagtattaatctgctcataccgatctcttcccaatactttatgagcatcatcaaacagaggaatcacagcataatcctgaccactttcgatattgttattatttagattgaaattcttggcaagagtattgtcactgaattcaactgactgtgtaatggcattggcgggtacattgtccagcataatagctgctccgatgcttttggttgctccggctgcggataagtcaatacttaactcgaattttgttactttattctctttattagtatatattttccttttctgaatggtcagaacgatatcattcatatcataatctccatatagtggccattggtcttcgaagaggtaagtataatctttgttgtcttccacttcaatagggaattcaggatcttccgggtcaggggtagggtcaggtatttctgaaagttcaccacatgaagtaatgattgttttggaaccattcgggatatataattctactgaattttccataatgtaattagggttattggcaggtacccctttggcgaattccccttccgggcattcaatatccaaattaccattgaacttagttgtccaaccagtagatatgctttttgtggattttattaatgaacgagttccggcagctttaaaagtgacattaggaatatccattatctctgcttttatcatagaaccattattcagttcaaaagtgcttccgctattaccgcatttaaaagatggaatagctataaaagtaccattttctacgccaccagccaatatacctttattcattatgatagttccgcttgttcctccgaattcgaaagaattttgggcataaagactgcaattattagtaaaagtagggttaccgccattatcattacttattttttgagcattaacagttccatcatttacaccaatcccacctataatgaaagttggagtattaattgttgcttcagttccattataaaaatagcatgttgcatcttgagaattaaactttaatgcaccttcttgaatagtcaattctccaaagttataaatagctcctttggtaaatacggactgttcccaagaagcaacagattttcctgtaacattaattgtggctttaggagcattgtataaaatagacgtcgtattcaagtccttcatactattgacactaattgttccaaaatttttcagtaatactcctatggcagcaagattgatgttattgccaataagacttccgcctgattgaatcgttaatattgagttgtcagcaataagaaaactcgtgaatgaatcggtgttgatttttccacccttcaaaataataatatctgcactttgtatttggttttgcgagggtgtccattcaccttctacaaatatggtaaatcttccgccattcaaatattcactggtatggttgatttcaccattaaatttgttttttatgatatagcttttgcctgcttccaaatgatgatttgattgattccaattagtattacctgtaagttcaatagctcctgtggtatcataagtttcttcgggatatttttctggaatattatagcttccgatggtcgcttttgcaactcttgtagtccttgaacctacaaattctttatttttagatacatcccatgtactaatagacactctgcttctagagtctgtcttacgaatatataggtaattagttccttctgtataatttatttcttgtgaaaaagcttgacctttcttggcaactcctttggcaagtatatggtaatcagacgttgaaaatggatttgcgtccaatatttctatttggttgtaaagttcatcatcaatttctatgtttagaatactagttgtagtcatattccagtcaaatccatccggtgcagcaaaaccgtctcccattggattggctgtctgataagacggatcatatagatccttctcggaatctacgcaactggataacatgcttactattgctatcgcaataatagatgtaagcagaattgtttttttcatcataatgtctattgtttgattgtttttttgtttgctgcaaagatagttgtatattttggattaaagatgtatttattgatatttcttgtgtaaaaaacaacgataattccgttttggttcgctttatatgaaaaacgaaagaaaaacctcctgattttttcttttgcagaaatattatagaatgaaaatcaggagattactatagagatttttttttagggtttggtaatttcccctattaaacaagagttcattttgtatcggatgtctttattagatagtccgtgtcccagcaaaaacatcagtttagttacagcacattcgggagtactgtcatatccactgataacacctgcttcgagtagatgcattccggtctcgtaacgtcccatttctactgctccggaagcacattgtgtgatgttaacaatgataattccacgatcagtagcctcttttaattcccggatgaaccattctttttgcggtgcatttcctgatccgaatgttttcatgacgaccgctttcaatccggggacatggagtagtgaatgaatgatctcctcctggatgccggggaaaagagttaatattaccacattcgtatcaaacagatagtgtggctttagtggtttgtccgggtccggtttgcgaataaggttgggctcgtatttaatatggatgcctacgcgtgccaatggcgggtaattgaaagaccggaaggcattaaagttctcagcattgatttttgtggtacgattaccccgcatcaagtgattttcaaagaaaatacatacttcggggacaatagctgtaccgtccggattcttggcagcagcaatctcgattgcagtgatcagattttcttttccgtccgtacgcagcgttccgattggcaattgagaaccggtcagaataacaggcttactcagattttcgagcataaaacttagggcagaagccgtataggccattgtatccgttccatgcaaaattacaaagccatcgaaatagtcgtaattatagttgatgatctttacaagttttgcccagtaagctggttccatatccgaggagtcgagaggaggatcgaattgataggaggaaatgcgatagttgaatcttttcagctcaggaacgtgcttgagcaaatggtcgaaattaaagttttctaaggcacctgtctccggattttctatcattccgatagttccacccgtgtaaattaacaaaacggaaggggtctctactctcataattgatgaatttctgttaaaacgctgacaaagatatagattaattgcgaattatgaatagtaaatgatgaatttgttcgtagtttgcagtgaaatgttataaatctgaatatttatgcggaattatacgatggattaaaagaaaaaatcaagtgagttgtaaaaatagtcaagtagctaaaattgtttggaaagaatggttatgcaaagcaaaacgatactgcccggctattttagctaccatttgtctgactatttcttatgtctatttaagcgcatctttcagttttagaatggctttttccggatctttttcttcttcaagcagagtgacaaagcggctaccgatgatagctccggaagcatgttcgcaagctgcttgaaaagtagctttgttggagataccgaaaccaaccattagcgggttgcgcagattcatatcttcgatctttttgaaataggcacgtttctgttcattaaagtcttgttgtgcgcctgtagttgctgcggatgaaaccatatagatgaatccgtctgtatgtgcatcgatctcacgtacccgctcttcgctggtctccggggtgatgagcatgattactttgattccataacgttcggcaatgatacggtagtgatcctgataatctctgaaaggcaagtcggggatgataacgccgtctattccgcattccacgcatttgcggcagaagttttcaaatccgaactgcataatagggtttaagtatcccataaataccaatggaatacttacttcctggcgaatgtttcgtaattgttcgaaaaggattttcaatgacattccgttgcgtaatgcctgagtggcggcattctggataacgatgccgtctgccatagggtcactgaatggaataccgacttcaatcatgctgacgccatgtttttcgagagtacggatgacattgactgttccatcaagggtaggattacctgcacaaaaataaatagaaaggatgtctttcttgttgctattaaagagttgattaattctgttcatgattttgagaatttaattttatgactttagttcatttagaaatatccggattcgttccggatctttttccccgggcttcagttcgaaacgactgttcaggtcgtagcctgccagacggggatggtcgaatgctttcaatgcattggcactgtgtgagttgatgccgccactcaataagaatggaacttgtccgttgtaggtatgcagaatgttccagtcgaattggtttcctgagccaccatactgctcacatttcgtatcaaacaggaaaagattgcaagttttttcatactcgcttacgtgattcaaatctttcggacgagctacagaaaaagctttgatgattttcaggccggaggtgcgcaatgactgacagtattccggtgattctttgccgtggagctggatatattccagtccaaaacggtcggcgtacatcgtgattacatctttgtcttcatttacaaaaactccgacacggcgggcatgaacaggtaggtaagcgggaagttcgtagatataacggggagatttgggatagaagataaatcccatcatatccactctttgtagtgactccacatcccgtatattttgggcttcacgcataccgcatactttgatgatttttccgttgatcatagggctgtccgtttttggaagttcatatatttattggatggctttcagaaagttctgcagagtttctcccggttgcggagttttcataaatgtctctccgatgaggaatccccggaatccggcggtccgaagacgttttaccacttccggatcggaaatgccactctctgatactaataccgcatcttgtggaagttgtcctgccagtcggaaagagttttctacatctgtgaagaaagtacccagattgcgattattaatcccaatcatatcaattttgctattaatataaggtaactcttccgcactatggatttcaagtaatacttccagtcccagttcatgcgcctgctctgccagttcctgacatttttcctgtttcagtgcggcggcgataagaagtacggcatccgcaccgacaatttttgcctgatataactgatactcatcaatgataaagtcttttcttataatgggcacatcgaccaaaggacgtgctgtacgaatatctttcagacttcctccaaaaaacttctcatcagtgagaatagagagggcggaagcacctgccgcaaggtatgacggaacaatttcttcgggacgtgcctcctgtttgatccaccctttggatggcgagcgacgcttaaattcggctataataccggaatcggaagaagccaatgcccgtttcatagaacgggaagccggaacttcattgataccttcctgcaactgttcgatggaaatagcctgcttttgcaaatcgacttcaaaccgtttgttagctataatttcggataatatatctttcattaatcttaaatttagaatcaaggcaaaggatatcgcatattcatcctttaccacttatcatttataacttattacctattacttattattcaattcaatgaatttcttcagtgtagccaatgcccggccactttctagtgattctttagcgagggcgatgcactcttcaatcgttttttccggacgaactacttgaatagcgaaagctgcattgataacaaccacgtttttctgtgcttccgtagctgtattgttcatgatgttatcaaagattttagcagcatcttccggtgtctgtccaccatccagatcagtatcctgataacgtgcaaatccgagaccttccggagtataaatcttctcattgccacaggtagctaccttaaactcgttcgtcagagaaatctcatcatatccgtccaggctatgtacaacggcaaatttagtcttactctcctgataagtataggtataaaggcgcaaaagtggaagattatacacgcctaaaagctgataagtcggcaacaccggattgaccaacggaccgagcatattaaagaatgtacgtaccgccaatcctttacggatcggggcaactgccttcagtgccggattgaacaaaggagcgtgcagataagcaatattacattgttccatgctgcgccgcatctgatcaacatcacttgtgaatttaaccccatgttgctccatcacattgctggcaccgctgactgaagtagctccataattgccatgttttactaccggaatacctgctccggctactgtaaagcaggccgccgtagaaatgttgaacgtattttttccatctcctcccgtaccgacaatatcgatcggagcaaactcgctcaaatcaaccggaacccgcatttccaataatgcatcacggaatccgcataattcttcgacagaaatattacgcatcagaaagacagtaatcagtgatgctacctgtacgtcattatatttcccttgtgcgatgttttgcaggatagtacgtgcttcatcgcgtcccaaatattggtgttcgaaaagtttatatagaatctgtttcataagtttattcgtttaagaagtttttgatgatttcttttccttgcggagtcagtacggattcgggatggaactggatgccatgtacatcataggttttgtgacgtaatgccatgatttgtccttcctgactttcagcagttatctccaggcactcgggaaaaccttcccggctgactacccaggaatgataacgtccgacaggtatctctttgcccagcccttcaaaaagtacgtctttctgcaggatgctgatcggtgtctgtacaccgtgatatacttctttcaggttttccagtcgtgcaccaaaagcctcgccgatggcctgatgtcccagacaaacgcctaaaatactctttgtcggtgcatatcgtttgataatgggcaatagcaagcctgcttcttcgggtattcccggccccggtgaaagtatgatcttatcaaatcgttccacttcatcaaggtttatctggtcgttgcggactacttcgacgtctgtagctcccagttctttcactgcatgcagcaaattgtaggtgaaagaatcatagttatctaaaagtaatattttcattttattgttattgtaaaattgttgttcaaatactgtttctgacttatcaggcagatcgctctgaacagttagttttttaaattaacagctaaatcgatagcctttttaagagctcctaatttattgtttacctcttgcaactcgtattcatcctgactgcgtgcaacgataccgcctccggcctggaaccataactcgttattacggctgacaaaagtacggatggtgattgcctggttcagttctccgttaagtccgataaagccgatacagccgccataagcaccgcggttatgaggttcgatttcactgatcagctgcatggcgcgtactttcggtgctccgctcaacgttcccgcagggaaagtatcgatgaaagttttaatcttatccgccccttcattcagctgaccgctcacgcggctgaccagatgaatcacatgactgtaatactgtggttccttataaaacaatacccgtacatcatggcaattacgtgaaagatcatttcttgccagatcaaccagcatcacatgctccgcgttctctttcggatcggcaagcagtgcttccgccaattcgcggtcttttaccgtatctccggtacggcgggttgttccggcaatcgggtcgatgtaggcacgtccgtcttcaattttacagtgagtctccggagaagaaccgaaaatgcggtatcctccgaaatcgaaatagaaaagataaggagaagggttgatgctgcgaagagcacgatagactttgaaatcatctccggcataaggctggatgaatcttctggaaaggacaatctgaaaaacatcaccacgcatacaatgggcaatacccttgcgaacgttcgctttatgttcctcatcggagatcgggctgctgacaggacctgtcaccgagaaattataagaagcataatttctgttttcgatagcggcctccagttccggcaaaccgctttcttcaccttcgcccagcatttctaccaatgtcaattcattcttgaaatgattgaaaacgatgatatacttatataatatgtatagcaagtccggagcatcattctgctcatcatgactttctttcaccgggatatgttcgaagtatttcactgcgttgaatgtggtgtatccgtaaagtccgcacacattcttgttttctccggtcacttgaaactgactgatgaattgattcatcgctttttctaccgtgaatgattgggtgagcggctcttccttccgactgttgtcaggataactagcagtgactattccgctattgacaccgatacttgccagcggacaaagagcgatgaacgagagggaattttctcctgcatgataatcggaactctccatcaatgcagattgtgggtacatatcacgtactttcagatagatactgacaggagtgtgcatatctccgagtacctgtttgctatgggctgtataactgaatgttttcatttttataatttctaaattcaaactacaaaactagatgttgataatcacttttcattgaaagacaaataagtttcaatgtctttgtcgccacgtcccgatacggtcagtacaaccacatcttccggtttgaacttcaattttttcagcgcacccagtgcgtgggcagattccagtgcgggaatgattccttcaagtttggtcagttcataagcggcttctattgcttcgtcatcattgacagccaatacggtagcccgtctttgagcggcaagattggcgtgtatcggtccgattcccggatagtccagtccggcggagatagagtagggttcttcaatctgtccgtcttcgttctggataacgtaagtacgggctccatggataatgcccattttcccaagctgtatagtggcggcggtcattccggtttctattccttttcctcctgcttctgccagaatgatgcctacccgtccgtcattgatataatgataaatcgttccggcggcattgcttcctccacctacacaggctatcagataatcagggtgatcacgtccttctttctccataagttgttttttgatttcttcgctgattacggattgcaggcgtgccaccatgtcgggataaggatggggacctactgttgagccgatgatataataagtgtcggcaggatgacagcaccagtcgcggattgcttcgttggtcgcatctttcagtgtcatgttaccggaagtgactgggattacggtagctcccagcatcttcattttttcgacattgatgtgctggcgctcaacgtccgttttacccatatagacaatacattccatatccatcaaagcacatacggtagccgttgcaacgccgtgttgtccggctccggtttcagcgataatacgtttctttcccatgcggcgtgccagcaaaatctgtccgatagtattattgattttgtgggcacctgtatggttcaggtcttcccgtttcagatacattttgcaaccatacttttctgaaagtctgcgggcgagatagagtggggaagggcggcctacgtagtcacgcagcaactggtcaaactcctttttgaaatcttcgctttcgagcactccgaggtacgtattcttcagttcctctacacatttgtggagaatttccggaacataagcgccgccgaactctccgtagtaaccatcctgatcaactaaaaaacttttcataatcctatttttatttattattatttattcgattttcaaaaacgggcaaataaaaagagccctgtcgcaggttgcgacagggctctttcaaatttgttatatctttaatgaggtatatacatacgagcactgctcccttacgactgtcggagttgtaacgggcgccaccaccaatatgtatttactaacattgttctcattgtcttttgttatttatcggggacaaatatagacactttgtttgaaacaacaaacaaaatcttactttttttctttttccccttcatttttctgatatagaacaattttctgcctgatctgttcttataaatattgaatatttaaacgaaaaacaattatgaaacagagaaaagtcttagtaggtatcgctattgccatttttattatattattgctttattggttattggtagctgaagatatgaaaccttggctgtccgctatggttccttcagccttgcaacaattcattgcctgatcccgacaggtttcagataattggcgtatatttgcaaggttagtaactaataaccaaaataataacaatagacagatatggaaaattttatctttcagaatcccgtaaagttgattatggggcatggaatgattgcccggttgagcaaagaaataccatccgacaaacgtatcatgataacttttggcggaggcagcgtgaaaaagaatggtgtgtatgatcaggtaaaagaagcgcttaaagaccattttacaatagagttttggggcatcgagcctaatccggccatcgaaacgcttcgcaaggcgattgctttgggcaaggagcagaaagtcgattatctattggctgtaggcggtggttctgtgattgatggtacgaaattgatttccgcaggtttgttgtacgacggtgatgcatgggatttggtacttgccggacgtccggttaccaagactgttccgctttctaccgtattgacacttcctgccacaggttcggaaatgaataacggagctgttatctctcgtcacgaaactaaggaaaaatatcctttttattccaatttcccattgttctctattcttgatccggaagtaacctttactctacctcctcatcaggtggcgtgcggattggcggatacattcgttcatgtgatggaacaatacatgacagttgccggacaaagccgtgtgatggaccgttgggcggaaggtatcctgcaaactctggtagaaatagctccaaagattcgtgagaaccagcatgattatcagcttatggcagatttcatgctttctgcaacaatggcattgaatggcttcattgcaatgggagtgtctcaggactgggcgactcacatgatcggtcatgaaatcactgcattgcatggactgacacatgggcatacgctggtgattattctcccggcaactttacgtgtccttcgggaagcgaaaggagacaagttggtgcaatacggtgaaagagtatggggaattacttccggaacgaaagaagaacgcattgatgaagcaattgatcgtactgaagagtttttccgttcattgggcttgactacccgtctgcatgaagaaaatatcggtgaagaaaccgttttggaaattgaacgccggtttaatgaacgtggtgccaagtatggagaaaatgagaatgtgacaggagccgttgcccgtaaaatattggaggctgccctctgatcgcttcttttgacactgttttgaactaaataatagtcggttctatcttcaattctcctccttcgggaaggaggagtacccgtagggggaggtggtaggtgaatacataatcctgtcatttacaaagaaataggtataaacattgtttttcctaccacctcggtcttcgaccactcctccttcccgaagctaccctttatacacaagtcttagctgattaactcatacagttcaaactgtgtataaaatctatccagtccattcttaaaggtaatatatcctggaatggactggctcttgtatgcactccatgctcctaaccttgcaataatccatgctgcccatgccattgattcttttttatatggattttgctgtattttggtatttccctcactcttttttcctactatatgtaataatgctatttctttgcttgtaaagtagatttctgaagagagtttttcatcttctttatcaaaagaaagtttgagtaccatcacctgcagggctgcctgcaaggaaattaagattagtttttgtaatgccgaaactgtttccaactgtgcgtcctcaatcatgaatccctttcttttgagcactctgaacaactcttcaatcagccatctacaacgataccaaccgatacattcaattgcttgttctacagtctccaccacatgtgtagttagcagtctccattcaatagggctctcatttaccggtgtactggaagatttttctttaacatgtatgcaataaagactaacagggggactgccctttgccggaccgttaacaggagcgcacaaggtgactctttcaaagcgaagttccatgcacgctacccgtttcttacgtccgcttcccgggagcacttcaaagctatactctgcccgtagaacagcctgctccattaatgtattcagatggacagaacagtctggatcatccaaccggcaattcctttcatgaacagaacgtatcagcaagtgaacattatcagtagggatacggctgaaaagctcgaaaatgtccgcttcacggtcaccgatgatcgttttaactgcatcccggggcatttgctcactggcagccattccactttctatccaacgatatgactctttttcttctataggctgatatctgtaattacgttcttcacgacttaaagcagccggtgagcgattccactgcttaaccgaagaaaagcctataggaatatgactggaggcatccactaccaagacaggatgcaaaaaagtaccacattgcttttgaccgacaatgccgggactggctgtttttttcttcattcgctcaacatgagcctcatagtttatctccgaggtatcttgaatacacagtaaatgcttacgaccggaagcattcttacagcaagtgtgtatcagacctgataagatagcatcagagctgactgaggaattgttcaaaaatctataagcacccatcttttctttatgttccttactaaattgattcactatagcactttgatggacaaccatctgagagcaaattaagtttaaacgccgcaaaagccgaggatcacgaatttgatctgtctctaataacatcaagcaaagataaaaaaaataatatatacttgtgtataaagggtagcttcccgaaggaggagaatggagttactattgtgtactactgtttagttcattcctaaacagaaaggagtaaaactgtacaagtatgaattagtgtgtacagccatttacagttaattatttgatttttgggttatcggaagtctgaaccaaaagcacgaaccttctccttctttagaatctgctccgatagtgccgcctaagcgctctacgatcacccggcagatagccagaccaagtcccgtaccttttgcgaatgtatttaacttgacgaaacgttcgaatacctcgtttattttatccgccggaatcccgattcccgtgtcttttacatagaagtagatttcatcttttgcttcgtcaatccggtatcccatttgaatggaacctttcggagtgaacttcatcgcattgtttgtgaagttgatgattacttgcgaaagacgtacgcggtctgtgttgagaatacattcttccgctttctccgtgaaggtgattgccacgtcgggggaagtgtttttctcctgcatttgcctgcaaatgccctccatcagatcattgatatcggtaggggcaagggtaaattccatcgtaccggcttcgattttggaaagatcgagaatatcatctatcaattgcagtaataattcattgttactggacactatcttcatgtattcctgtttctcttcctcttcacctgtttggcaaatcatgtcagagaatccaataatcgcattcaatggagtacgtatctcatgactcatgttggcaagaaaagctgatttcagacggtttgattcttctgctttttcttttgcttcctgtagcatcttgtccatttttaccttttcggtgatgtcttcgaagcgcaacagaccaccgatgatttctgttccttcattatcataaaccggagtagctgtcacctcaaagtctacctgatctatccggatggtatggcgtatgatttttccttgttcaatcgctttctgaaaggcgcattgtccgcatggagtatcccggagtgcacttgttttgtaacagatttgtcccggtgtataatgccttcctttcacgaggctggcaatttgcgttgtttcttcccattgtaccagataatttttatcgatatagatgagcccgaagttgacgctcttcaaggctaacttttgtttgttcagcgctttttccagttcttctttagcggcgatcagttcccgttcgtaagtttttagccgggtgatgtcccatcgggtcactaacagccattttttcttttccttccatttgataatcgattttacggcaatcgtatcatgtactattccgtctactgtgctgtagctttcttctgcacggtataccttgcctgcctgtacaagtgattcatctacatcccggtatcttctgccccgttcttctccatagatttcataatctgtgcatcctactgcttcttcccgcttaatgccggattgcagttcggatcctttgttccagtaatagtatcggaaactatcctggatatcttttaccataatagggaaagggaggttatcgagtatatcgaataaagaatgatagtaatcctgttcttttcctatattctttttaagttgtcgtagtctgtataataaaaagcagatgatcaggagtaaaaagcctattagtaaataataataactccaatgctggtctgtaatccatataacggatagtatattgtttgccataatttatgtttgtactaaatctgtggtaaatatatgcattttttgtaattcacaaagggaatttctgaaatatattgtatgtcagccttatgaaacctttctaaaaggaataccttgtctgattagtagaactttggtgccttctatttccggtttggttttaaaatgtttttaatggaacgcattttcgtaaagagtaagaatgtattaaaatattaaatgatgtcccgtgaaccaaaaacaattctaatttgtttttataacggcaaagtattttttaattttgctcttccaaaataaatctttgatacattcaggataaaacaatcattttattttttgcttatgttgataaccattatcattctcgttctttcggctatcttttttgtaaacggtaagatacgctcggatcttgtggcactatgtgcattggtagctttgcttatctttcagatattaacacccgacgaagccctttccggtttctccaattcggtagtcattatgatgatcggactgtttgtcgtgggcggagctatttttcagacaggactggcaaaaatgattagttcgcgtattcttaaacttgctggaaacagtgaaattcgcctgttcttgcttgttatgctggtaacttccgctatcggtgcgtttgtcagtaataccgggacggtggcattgatgcttcccattgtggtcagtctggcgatgagcgccaaaatgaatccgagccggttgctgatgccgttggcctttgccagtagtatgggaggcatgatgacgctgatcggtacaccgcccaaccttgttatacaaaatacattgacttccgcaggcttcgaaccgctttctttctttactttcctgcccgtaggtctggtaagtgtggctgtcggtacgttggttctgatgccgcttagtaaatggtttctttctaaaaaaggacagaaagatgataacagccgttcgggtaagtcactgaaacagttggtgaatgaatatgggctttccagtaatctgttccgtatgcaggtgatcaaagactcccgccttttgggaaagaccatcctcgatctggatattcgtcgtaaatatggacttaatattatggaagtccgtcgtggagacgcttcgcagcaccgttttctgaagactattactcagaaacttgccgaaccggatactatgctggaagcggaagatattctgtatgtgacgggagaatttgataaagtgcagcagtttgccgaagattatctgctggatatccttgatgatcatgctacggaagagacaagaagcactactaattcgcttgatttttatgatatcggtattgccgaaattgtattgatgcctgcttccaatctggtcaatcagactattaaagagtccggattccgtgataagtttaatgtgaatgtattaggtatccgtcgtaaaaaggaatatctgttgcaggatttgggtaatgagcggattcatagtggtgatgtgcttttagtgcaggggacgtggagtaatattgcccggcttagtaaggaagattcggattgggtggtgttgggacagcctttggcagaagcggctaaagtaacgttggactataaagcacccgttgctgctgctatcatggtattgatggtggcaatgatggtattcgattttattccggttgcgccggttacggcagttatgatagctggtatcctgatggttctgacgggatgtttccgtaatgtggaagcagcttacaaaacaatcaactgggaaagtattgtattgattgcagctatgcttcctatgtctttggcattagagaaaacaggcgcttcggagtacatctccaatactttggtaagtgggcttggatcttacggaccggtagcattgatggctggtatttattttacaacgtcattaatgactatgtttatcagtaataccgctactgctgtcttgcttgccccgattgctttgcaaagtgctatgcagatcggagttagtccggttcctttcctgtttgccgtgacggtgggtgcaagtatgtgtttcgcttctccgttctctacaccgcctaatgcgctggtgatgcctgccggacaatatacttttatggattatataaaagtgggattaccgttgcagattatcatgggaattgtgatgatattggtgctgcctctgattttcccattctgacagatagaagggaattagcataacgttatagcaactgccctgtagtctgatatcagattacagggcagttgctatatcaatataggaaggttattgttatgcagcagattttcattgacaaacaaacacctgtttttccgagttatcattaaatgcttcttctccaaatcctccatacttatggataatattaaaaccattccatttcaagtatgaatccagttcttgagggaaaaacattctcatatccaaattttggatagaattgaatttaccattgatataataatgccattcaatgcgattaatctgagttttattttcatatcgcatcttttgttttatcaatacttctcttccgtcgtcagtggtatatgcagcaatttccttctgttctttttcgccttcaacgatatattgaatattcggattgaagcaatctaataagaataaacctccgtctttgaggtggtttttaacgacattaaatactttaaataagtcctcattcttatataaatgatggattgaattaaatggaataaaaataaggtcgtatttttcttgtagatttaaagtcctgatatctgcttcaatgaagttgatttctaatcctgcttcggaagctttgagtcttgcttgggcaagcattgagggagtgtaatcaacaccactaatatcatatccatcccttgcaattggaagagtaagcctgcctgttccacaacaaagttcgagtattcgggcacctttactttggggtagccaccgcttataaaattgcaaatcagataggtcggtattcatcccgtcataaatatttgcatcataaattaaatcaccaactttataatctgtattcatttatatcctccaatatctattgtttattaataaaaatcgcaatagagtttccagtctcctgtttggctgtttttagcgaaatacatatttccactatccacaatttccagatttgctttttcatctgacgctatttgaatcagaaattcatatccttcaccaaagtctattcccgattgaataaagttaggataaccacctattttatgtccttcgtttatttccacataatcgaaataatcggttatttctcccgattcttccatttcaagaagttcactttctatttcagcgggtatgcctcctccatcccatacgggataatcttcttcaatcaattggcttttcaatggaaatggctttacgaatgatgctttatttactaaatcttttacgactaatacatcattcattttatattcccgaataagccagttattcccatttgttactaaatccataggtatatcagcagacgcaaaaatagtcagcactttagtgtcatgcaggcttgccggaacatagggcagactttcaagacaaacctgaaataatgggatcattaatttaccattgttatcggttggaatttcttcatcttctttataaagataaactcgtccaatccaactttctgtgttagagtttgttggtctgaatccacctgtggtgaagtttgttgctttctttacaagctgtttttttattgctgtaattttatccattctatgattctttagtttacaggtaatggttggtgaatagccgactattagggtcgcttattcgcttgttgttaacttttttatttcatttcctctcacatcaatataaagtaagtcatcatggtctgttatactatatagctccatcaaatcaactgttactaaataatatttatcaagtccttcacagtcacctaataaatgtatgtatatcagacattcttgctttataaactataattattgtctctaaaaatacggttttgtttaattccctacaaaagaaacaggcagttttttcttccatctaatagaaaagtgaaaaaagtaatatattgcatattatattttagagactatttgagtgcaggtattgatgattgcctttatcataatgttcagtgataagtctttattctgtcatttgtttgtagaaagactcgatttgctttcctgcctgttttttaataatcttctgttagtttggaaagatggttgaattaccgcaaatatacggttgatttgcataaaatgaccgtatggtttgatgaaaaacaccgtattgtttgtgaaaaagatgcggatgaagtaaccaagagatgcggatggtgttactaaaaggtaggtatgaagtaagtaaaccattgctatagtgtcatcataccgataaaactgtctttatttaatacttttagtcttctctgttttctatttcgctctttggaaagtttaagtgcttaatgttgaaaataaacagaatcaatgaaaatgtaatcatatagatatgtaagtagactattatttgttaataagcacagggttggatgcaaatgctgaatttctgatatatgctaatttccctacattcgcgaaaaaatatcaatagtagtatgaccggctaaagaagctcttcttgatacattacgaattacaaactgtcaaaaacagacttatcttacaaactgtcattttatacatgaagaaagatggaaattatagaaaaaggctcctgatgcaaataagttgtcattcggatatcaggagccttttatctatttattgaatctgtggtgtgacaggtgtattcatcttctgagtgtacaggctgtcgataatcccgtcggacagtccgatggtaggtacaatgattccggtagctttcacattcgtagctacttccagaaatatctccgcagccggaacgatgacatccgcccgatcaggttttagcttatactgtttgatacgttgctcggcaggaagagcttgcaatgcttcgtaaatttcacgtagtgattcgacgggtaggagggaagcctttttgtctttcttgtctgccagacgaaaaagtttattgatgtttcctcccgaaccgatgatgctgataggcgcgtattccgcagcaagccctatgaggtcggtgcgtaaagcctctttttcttcttctttcaccatgccgctgagcatacgaaccgttccgatattgtatgaacgggaatttttcagttcaccgttactgatcagattaatctcggtactgccaccaccgacatctacatacaggtagttttgtccggaagcaaaaagttgctcgatatggttgtcatatacaatgtgtgcttcttcttgtccgtcgatgatatctacgcggatacctgttttcctggctatttgtcgggcgatgtcctttccgttgcgtgcgtcacgcatggcggacgtagcacaggcacggtaatctactacatcatatatcttcatcaactgtttgtaggctttcatcagccggatcagtttcttttctttttcagcagaaataactcccatggtaaaagcatcttctcccagtcgtaaggggatacggatgagttgtaccttgctcattaattcgggagcgttttcttcgtttacgcattttatcaatagccgcacggcattcgaacctatgtcgatagctgcataattaactttcttcatacttatcataatgtattcttgtatcttctatataattcttcttgcgaacggaatacgacagtggctgtctctgcttcggcaagggcaggagtgaagtctttgcagagtgtggaaggccggttttcccaaggtcggttttctccggtaccgtctacgatacgccctttggctgtatcccgatatccgtagcagacaattcgttttaagtctgcctgtatttctttgtcgtacaccggagccagtacttcgatccggttatcaagattgcggggcatccagtcggcagaaccgatataatatttttcttctccgccattggcaaagataaagatacgggagtgttcaagatatcggtcgataataccgttgatatggatattttcactgatacctgcgatgcctgtcaccagcgaacagttgccgcgtactaccagttccacctgaactccggctgtcgaggcttcgtagagtttttctataagcgcacggtcggtaatatggtttacttttgccagaatataggcttctttcccttgttccttgttctttatttccttgttgatgagagcaatcagacgtttgcgcatatcgttgggcgaaaccagtaattctttgaaattgacgggagtgtatggtttctcgataaaatcgaaaacggcattcacttcccgtaccagcgggcgatgggcggtcatgatggtataatcggtatacatacgtgcgtttccttcatgaaagtttcctgtgctgatgcaggcaatgtctccgtgacgggtaccgatatgtaccagtttggaatgaatcttcagtccctccactccgaagataacatggatgcctgcgtcctgcattcttttgctccagttgatgttggatgcttcgtcgaaacgtgccagtagttcgatgaccaccgttactttcttcccgtttttggctgcgcagatcagtgctttgatcacttttgattctttagcgagccggtaaagtgtcatcttgatgcttttaacttctttgctgatggctgcttcacgaagtacgcggataaaagtatcgaagctatggaatggataatgcagggagcggtccttctgacgaatcaatgtgagcaggctttctttgccgtttagttcgggtttgaaaaccggttcccagacgggatactttaagtcgtagcgaccgcacaccggaaatttcatcaagtctttgaagttatgatagcgtcctcctgccacacgggtgtcgtttttgtctacattcagccggtcaactaatcttttcagtaaatctttgggaatctgttcgtcataaacgaatcgaatcggttctcctctcttccggcttttcactccttttgaaatcttctgaagtacgcctgtccgcaggtcgctgtctatctccatttccgcgtctttggtgaatttaaaggtatatgcctcgtaatccgtatatttcatgccgacaaaaatcaacggcagacaatagcggatcacatcatcgagaaacatcagatatgttttcccctccgagtccggcaattggataaaacggccgtattcttcggtgggcaattcgatcactgcataatctttctcttttatttttcctgtttcgtctttacgaagcaggcggatggcgagataaatatcttcgtcagtctggtcgtccagcggtcgggctccgttgaggaaaagaggggtggtggagccattcagtttattgcgatagaaggaggtgataaatgtcttttggtcatccgtcatttcggtgtctttgatgacgcagatgttctccttcttcagttcttccatgatagaagcgaaagtttcttcaaattgttcgtagaagcggttgtgtagtttgcttatctgcttcagtgtgcgtgtagccgtttcttgttctttctgtatgtttttatctgcatattcgatgatccggttcagcgtggctacgcggacacggaaaaactcatccagattattggaatagatgccaagaaaagtcaggcgttccagaagaggtacttccggacgggtagcttcgagcaggatacgctgattgaagtacatccagctgatgtcacgttctacataagggcacttcttttttgtttcgcttgatttcatgatgaaaaacctgtttattatttttttgcaaaagtatttaagtgaggtgtaatggctataacgattttgttacgaacttattacaatctacgtttgttatttttatatgtgaatagaaacacttatattcgcaaaagtattgaaatgtacttcgttaaaaaatatagaatatatgaaaacaatgaattactctctggttcgcattttgtttgcgcttgtcataggtctggtgttggtactttggccgaatacagcagctagttatattgtcattacgataggagtggcttttttgattcccggtgtcatcagtctttttagctttttcggacggaaaagatcggaacatgaaccggctccccgttttcctatcgagggaatcggcagtttgttattcggactttggctgattgtgatgcctgagttttttgcggacgtcctgatgttccttttaggctttatcctgatcatgggaggtgtgcagcagatcgcttctttgtcgatggcccgtcgctggacacctgttccggggattttctatctggtgccttcattgattcttatcgcaggtgttattgcgctgttcaatccgacgggagcacgtaatactgctttcattattatcggtatcagtagcttggtttattctctgtccgaactgatcaactggtttaagtttgcacgccgtcgtcctaagactccggttacgcctcacgatgaggatattgaggatgctaagattatagaataaaaaaagaagaggactaccgtcacggtacccctcccctgcaaacttaaaacaaccaacaaaagaaatagataatttctatcttaatgctgaatgaagatattctccattcagcatttcttttttatcttacaaacaacagttctctgtatttcggcagtgtccacatctggttgtctacgatcagttccagcttgtcaatgtggtaacgaatctcttccagtgccggaacgattgtatcgtggtaagcgatcgctttttcacgttcgctttcgatcttgttcgccacttttcgggcttcaatcattgcatctacgtgctctttgatgaaggcggtgcggtcggcgatttcttcgatcagttccagattcttggcagatagtctggctgctttatctgccggaaataaggactgcattttatagacattataaatcagatccgtctgatattgagtagcgaccggaataatgtggttcattgccaggtcacctaatacacgtgcttcaatctgaatctttttcgtgtaagtttcccattttacttcgttgcgggcttccagctcctttttcgtcatcacaccgattgcttcgaacatagcaattgtctccggtttcagatagttgtcgaagataacgggaacacttgtttcacagtccagacctcgacgggcggcttctactttccattcgtcgctgtaaccgttgccgtcgaagtggatagccttacattctttgatatatccgcgaattacttcaaggatagcggaaactttcggttctcccttttcgatcagagcgtctacatcctttttgaatttcatcagttgttctgctacggcagagttcaatgcaatcatggcacttgcacagttagcctcagagcctacggcacggaactcaaaccggtttccggtgaaagcgaaaggagaggtgcggttgcggtctgtattatcaatcagcaattcgggaatttggggaatatccagcttcattccctgttttccgctaaggttgatcagatcgtctttggtgctgttctcaatatgatccaatacctgtgacaactgtttgccgaggaaagaagaaatgatagcgggaggtgcttcattggctcccaggcgatgagcgttggtagcgctggaaatagaagctttcagtaatccgttgtgacggtaaactgccatcagcgtattcactacgaatgtgacaaagcgcagattatcttccggtgtcttgcccggtcccatcaacaggatacccgtatcggttcccagtgaccagttattgtgcttgccggaaccgttgacacccttgaacggcttctcatgaagcaatacacggaaaccgtgacggcggctgactttacgcatcaacgacatgatcagtaggttatggtcgtttgccaggttgcattcttcgaagataggagctaactcaaattggttcggagctacctcgttatgacgggtctttacaggaatacccagtttcaacgcttcaatttcaaggtctttcataaatgcggccacacgggtagggatggcaccgaaatagtggtcttccaactgctggttcttggcactgtcatgtcccatcaatgtgcgtcctgtcataagtaaatccggacgtgcggcatacaaaccttcatctaccagaaagtattcctgttcccatcccagataggcaacgaccttctttacttcaggattgaaatagtggcagacggcagttgcggctttatctacggcacgcagagctttcagtaacggtgctttataatcaagggcttcgcccgtatatgcgataaatacagtcgggatgcaaagcgtatcatctacgataaatgcgggtgatgatgggtcccatgcgctatatccgcgtgcttcgaaagtattacggataccgccgttcgggaaagaagaagcatccggttcctgctgtaccagcagcttgcctgtgaactcttccatcatgcctcctttgccgtcatgttcgacgaaagcgtcatgcttttctgccgtaccttcggtgagcggtgcaaaccagtgagtataatgagtgacacccatttcgacagcccatttcttcattccggcagctacttcatcggcgatgctgcggtctagcggggcaccattgtcaatagcgtcaatcagtgcgttgtataccttgcttggaaggtacttgaacatcttttccttgttgaacacatacttaccgaagtattccgaagggcgttcggcaggtgttgctacttcaactgctttcttcttgaaagctgtctctacgactctgaatcttagttttgacataatacctaatttgatttgttgttaaatatgttagagtgaagttttcttttttagcttagttgtaagcagattccccgtgttcgtagatgtcgagaccttcttcttcgacacgtgccggaacgcgaagtccgtgaatcttgtcgagtactttgaagataatgaatcccatacctgccgcccagactccgacaacaaccgcaccgaaaagctgggcacccaaaaagccggctccatgtccgtagaacaccccctcactggtagaaaacaatcctgtgagcactgttcccaagaaaccacaaaccccgtgtacggaagaagcaccgacaggatcgtcaatcttcaataccttgtcaataaagtcgactgcaaatatcatgactacaccacaaatggcaccgattaataccgctcctgagggagctacagcgtcacatccggctgtgatacctaccaaacctgccaaaacaccattcagtgtcagtgataaagacggtttgccatatttcatccagctcatcgccagtgcaaagaagccaccggcacaagccgccagatttgttgtcagaaatacatgtgagatggccattgcatccgcttcggtacttgctgccaactgtgatccggggttgaatccgaaccatccgaaccaaaggataaatacacccagtgcggcaactgtcaggttgtgtcccggaatagctcttgacttaccgtctttgccatatttaccgatacggggaccaagaatagcagcgcctaccaaagcaatccaaccaccaacggagtggacaatcgttgaacctgcaaagtcatggaatgtcgttccgaaaagattcatcatgaacgaaccttcttctccgttcatcagccagccgccaccccatgtccagtgaccggaaattgggtaaattagtacactgataaagatagtatagaccagatacatggagaacttggtgcgttccgccatcgctcccgatacaatcgtggctgccgttgcgcagaatactgtctgaaaaaccagaaatccttctctgggtaaatcactgtcgaggaatgacagatcaaagaagtgtggcattccgatgagacctcccgcaccaaacatcagaccgaaaccgatgaaccagtagagcaaggaaccaaacatgaaatccacaaagttcttcatcaaaatgttggcggtattcttgactctggtaaaacccgcctcaaccaatgcaaaccccggctgcataaaaaatacgagcattgccgcaagcagcatccagactgtattcaatcctaatgccagttccccgattgtatcgggagttgtttcggcagaagcagtggcggtttcagcaatttcaggtgtagttttgacttcagtaattgtctccgtagttgtcataaaagtatctgcatcaactgcttcctgtgcaaaagcactggttgcgaaacagcagaaaatgaacatagcagtggctatccacagctttgtgaagctgtgtctcttatatgttttatccataatgattatcttatttaatacctgtttttataatattatcatccgaaaggaaatctggccccggcaccttgccggttgccggttatcgttcctgttcggcgttatagagagcgatgtcgccacgttcggcggtgcggatgcggatggcgtcctcgataggaatgacgaaaatgcgtccgtcaccgatctctccggtttgtgcggctttgatgatagcctgtacggtcttttctgcatttttgtcgcgtactacaatagaaaccagaatacgttcgatggtgctggtatcatataccactccacgatagatacgtccttgccgtgctttaccgatccctcttacatcgtagtaagagaaccattcaatgtccgcttcgagcagagcgtctttcacgtcctcgaatttggttttacggatgatagcttcaatctttttcatataccttaaatattagtgttgacctgtaaaaagaagaggtatagggaggtggcagccatcgcaggttaccatacaacaaaccgataaaatctaaactctaactaccttcctgttccctatacgctctttgactatataaactctctctctcttaaaaacttaatccgaatgtgaagtaagcgccttccgtacgtggatttactgatactttggcaaatgccggaaccgagaatgaatcagtaaccctgatctccttgacagctccgagactgatgtcggaaacgcagaacccacttgtgtatccattataaaaagtcgtctcccaaggtaccattcctacatctactgtccagtcaagtcctccaaggctgaacggtgcactaagtgcgaggtaggaagaataagcccttttcccgttttctttaactccgtcggcacctgcaaagttcgtgtaccagttgattgccagcggaccaaaatcatatcctacctgtgcctcaaatacatgagcggttgaatgagcgccatatttgaaatacttgttggtaggtacctgagtgttgaaccagtaatccgttaccgagatgctgaaaccaccggttgaataaccgagagtcaaatcgaactctttagtatccgatgactcaaaccctaccgatccccatgctccgagtgaaagtcctttgtaagagattcctaatgaaggctgaatgctgactccgcctaaatcctgaccacgccagatataaccacttaccaagtctgctcctacggaggcttctactttatcctgcgccatcatattggatggcacaaggccgatcagtaataacgctgctgctatgcccctcaattttttgttaatcgtcgttttcatcgtctttttacctttaatagttagaaaaatgtggatgtacggtccagtgttatatagtagcgcgcaaaatactatcaaagccagttctttattcttctcattgcttccatacaatcattgtgatcgccgaatgctgtcagtcggatatatccctcaccgctggggccgaaacctacaccgggggttcctactacattggcttcatacaacatctgttcgaagaatcgccaggaagagagcccgttcggggttttcacccataagtatggagcattgacgcctccgtatactttcaatccggtagcttccagtccttccttcatgatcttcgcattgctcatataatagttaatcgtttctttaatctgtgctttgccttctgtactgtagacggcttccgctgcacgttgtgtgatgtacgaagtgccgttgaatttagtgcactggcggcggttccataatttgttgagtggaatccggtcgccttccagtgtggcagctgtcagttctttcgggactacggtatatccgcaacgtactccggtgaaaccggctgtctttgagaaactgcggaactcaatagcacatttcttggctcctttgatttcgtatatggagtgggggacatccgcatcctgaatataggcttcgtatgcggcatcgaacaaaatcagtgtatcatttgccaatgcatagtctacccacttttttagttccggtttggtcagtgtcgtccctgtcggattgttcgggtagcagaggtaaacaatgtctatccgtttgtcgggaatctccggaatgaagtcattctcacttgtacaaggcatataagtcacattgctccatttgcctgttccttcttccagcactccggcacgtccgcacatgacgttactgtcaatatataccgggtaaatagggtctgttacaccgacactattgtcgtggcgaaggatatcgccgatatttccggtatcacttttggctccgtcgttgacgaatatttctgatggtgagaaatgaatgccacgtggagcgaaatcattctttataatagcttcaatcagaaaatcgtacccctgctcaggaccatatccgcgaaatgtatctttacttgccagctcttccactgctttgtgcatagcctcgatacatgctttgggaagcggctgagtgacatctccgatacctaaccggataatatcctgcttcggatgcgttattttgaatgtatttaccttcttcgctatatccgagaacaaatagctccccggtaatttcaaaaaatgttcgtttactaatgccatattgttattgttttaagtttctgcaaaacctgttacctattacctaatacttattacctatccctccatctccccatcaaaaactttagttgccggtcctgtcattaatatgtgtcccgttgcttcttcccactcgatggtgacggttcccccatccattattatatcacattttcttcctgccaatccatggagaacagcggctacagccgtggcacaagcgcctgttccacaggcctgggtgattcctgaacctctttcccaaactctcatccgaatggtgtctttacctacgatctgagcaaactctacatttgtcctgtccggaaagagatgataattttctaactgcggaccaatttccggcagattgatttgggtaatatcttctacaaaagttaccagatgcgggtttcccattgatacccgggtagactgaaaaggaaattgatcgccgaaatctaccgcttccgtttccagaggactacccatatctacagtgactgccgtcacctttcctccttctacatgtaatttcagaaccttaatgcccgaacgggtgtcaagcgtgatttcctttttggcagttaatccgtattcgtatacatacttgcctacacaacggcttccattgccacacatcattgcttccgaaccatctgcattaaatatacgcatactgaaatctgctttgtcagaactgccaatcaatataagtccgtcacttccaattcccgtatgaaacttgctccattcgattgctttcttttcaggggctgctatcggatatcgggtagtatctacatatatgtagtcattacctgctccatgcatttttgtgaacttaatcttggttgtcattttgttcttcattaattggttgttgtatccttttgttttattacaatgcaaagatatgactttttgatttaacttttgatgaaaagatgtctaatctctatttattttatacaatcttacaatcgcgggaaataaagccatgttttgttataaattgaaattatgcatacctttatattaataaactgttatttgcttgatttgttttgcatatccttccataatatatgaagaatatttggggtaaatcagtccttgtattcgatctaaaatgtgaattttcgcttttacaataggtcgatatgctagtgattttcgcttttatatatcatattgcttgtttgcagttttgcagaacctttttgttatagcattgtttagtcactaataaatataataatgtagcaatatggatatagagaaacaattggaagttgcggcgcagagcgatcatttggtattgattgtgttttatgccgactggtcacctcattatgaatggatagggcctgtgctccgtacttatgaacggagagtcattgaattgattaacgtgaatatcgaggaaaataaaactgtagccgattctcataatatagatacggtgcctgcgttccttctgttgcataaaggacatgaattgtggaggcaggtaggagagttgaccatcggagagttgaaagaggtattggaagattttaaataagtcctgtttgaattttatgtaagaagcaccattatacagcaaataaatatgtataatggtgcttcttgtatctatcgaatatttgcaaaaagtttctgtcggctttttacattttctgagagtaactattttagtatttcctgtgccacagtcggctcgttggtcgtaatgaaatccaccttttggtctatgagccacttcatgtcttctgctttatctacagtccatacattgactttcagtccgagatcatgggcttctttgatccattcgggatgtttcttgattactcccatgtgatagtcgagtccggctgcaccgaggtctttcagctctttgggagatagctcgccgttgagatagaataccggagttccggcaggtgccaggcggataaactctttcatggcgtgcagtgagaaagtgatatattccatacggttttccagtcccagctttgttaccaaggcaagaatttcctgtacggctttcgtttcacgctttttgctgttaagtgcttttagttccaatataagtttggtattgcattttttaccggcttccagatactgttccaggctgggcaggttctctccgttcgatagtttcaatcctgtaagagcgtcacctttggaatactccatgtatttcatcttatagacagggtcatgattgataaccagtttattgtctttggtaagccatacatcaaattcggagccatagcaatggatagaatcggctttttgaagtgctgtgatactattttgcgcagaacctgctgttttccagtagccacgatgggcgataacttgcgacttttgcgcttgggcactagctactgaaatgataagggcaaccattagaataattctttttatcttcattgatagtacatttaaaaagtttatgagtccaaaattataaaaaataaaacacagatcagcctgttattatgctaatctgcgttaattgacagctttttatgcatagaagtctatactttttattcctgactttacaaactgatgaatatatattcaaagatatgagtttatttcagacatctaaaatttttcaacaaatttattttacctcttcggcataggcttcttcatgcactcctctcactgctctgccgcttggttcattcaggttacggaaagctacatcccatgccagcgcttctgctgtagagcaggccacacttggtacgcttggtacgctgcgggctgcgctttcactcggaaaatgctcttcaaagatactccggtagtaatattcttccttgttgagcggagtgttaatcgggaaacgttcggcagcgtgttccatctgttcatcactgacggcagccgctgtaatctctcttaaggtatcaatccacgaatatcccacaccatcactgaactgctctttttgtctccatgctacgctttccggtagcatatcggcaaaagcttcacgtacaattcgtttctcaatctcctttccggggcacattttagcttttggattcaacgccatcgctacatccagaaattccttgtccagaaatgggacacgtccctctacaccccaggctgataaactcttattggcacgaaggcaatcatacatatgcagttttgataacttacgtaccgtttcctcatggaaatctttcggagtgggagctttgtgaaagtaaagataaccgccgaaaacttcatcggcaccttcaccactcaataccattttgatccccatcgatttgatcacacgtgccagtaaatacatgggagtggaggcacgtaccgtagtcacatcatacgtctcgataaaatagataacatcccgaatagcatccagcccttcctgaaccgtataattgatttcatgatgaaccgtaccgatatattctgccacttcacgtgcctttatcaaatcgggcgcccccttcagaccgatggcaaaagaatgtagttgaggccaccaggcgtcacttgctccgtctgtttcaatacgttttgctgcatattttttggcgatagctgaaatcacagaactgtccagaccacctgaaagaagtactccatagggaacgtcactcatcagctggcgatgaacggcatcttccaatgcttcttttacatcactgactttggcatcattgtcttttacagactcatagtctgtccattcgcgtgtataccaacgcttcattttgccttctttactgtaaaagtaatgtcccggaagaaatggttcgtactcattacagaatccttcgagtgctttcagttcactgccgaagtagattttgccatccttgtcttttcctatatataaaggtatgactccgataggatcacgtgcaatgaggaactcgtctttttcttcatcataaagtacaaaggcgaaaattccgctgatctcttccagaaagtggatgcctttatctttataaagggcaagaatcacttcacagtcgcttccggtctgaaaatcatattgtccggcatagcgggcgcggatatcccgatggttgtagatttcaccgttcacggcgagcgcttgtttccggtcgggggagtataagggctgtcctccgctttgcgggtcaactatcgagaggcgttcgtgtgccagaatggcgcttccacctacgtagataccgctccagtccggtccgcgatgacggattttctgtgccattttcagtgctttgtctcttagctctttggtttgagtttttatgttgagtatacctgctattccacacataactttgagtatttggaagttaatataatttgttgattctctgttttttaaaagtcggttcgttactatttattcgttttccctggcttttcctttcgtttgacctgggtcatcttttagttcaacctaggttgttgtttcgttcaacctaggtcaaacgaataaataatagtctataaacttcatggtgttccttgctgtaagggttacttcaccaaatagtgatctatgtccgcagcagcctttcgtcctcctgccatcgcccgtactacgaggcttgctccggtagctgcatctccggcaaggaatacgttttctgcaaatttcggttgttccggtttcaggaatcccatggccagcagcaccatatctgcttcgattacttctttcttccctgtgaggttcatggtcggacgtccgccatctgttgccggtgtccattctacttcttccacctcgacgccggttactttaccgttcttacccaaaaactgattggaagtcaggcaccagcgacgggtacaaccttcttcatggctggaggtcgttttgaaaactaccggccattgcggccagggcgtagaaggattgtggccgacgggaggtttgggcataatttcaatttgcgtgacgctggttgctccctgtcgtacactggttccgatacagtccgaaccggtgtctccaccgccgatcacaagcacttttttgcctttggcattcaccagtttgtctttggggaaagtttgtccttccagaatcctgttctgttgcgccagcatttccagtgcgaaatggattcctttcaactcccgtcccggaatgcttaaatcacgggcagtcggtgtacccgtgcaaatgcaatatgcatcgaatccttccggcaaatggttaacgtctatttctactcccatttcaaactgaataccttctgcggcaagtattttcatgcggcggtcgattacgtttttgtccagtttgaagtttggaataccgaaacgtaataatcctcccgcagcttcatctttatcgaataacgttacggtgtatccttttagattcagttggttggcaactaccaatccggccggaccggcaccgacaactgctacttttttgccgtttctttggggatgctgcacctgtatatatccttcacggaaggcggcttctacaatggcagcttcattttcacggatagtcaccggttggtcacaggatagtttcagtacacaggatttctcacagagggcagggcagatacgtcctgtaaattccggaaagtcgcaagtggatgacagcacttcatacgcttctttccattttcctttgaataaagcgtcctgccattccggctgtttattgcctattggacaagcccagtgacaaaaaggtactccgcaatccatacaccgtgatgcctgtaatttacggctgttcgtattcaatgtttgttctacctgactatagtcagtgatgcgctcgctaacggggcggtatcccgcctcttgccgaggtatatttaaaaaagctttaggatctcccatcttgttaagtaataagtattaggtaataggtattaagcaataagtattaactatatggattaaagatgtttgaagctacggttaatacctaatacttaatacctaatacttgaattaatagtctctttgcatatctgctattttttgctgtaactttctcatctgctcttcctgtagtacttttttgtattcaataggtactatctggataaactgatctacgtaatggttccagtcatcgagcatggtacgtgccagtttcgaaccggtgtacaggtagtgctgacgaatcagttcgtgcagttctttgcggtaaccggcttcttcgatcagtgacagttcaaccatttccatgttgcagaagtagtcaaaattgccgtctttgttccatacgtaagccacaccgccactcataccggcggcaaaatttcgtccggtttgccccagaaccactacacggcctccggtcatatattcgcaacagtggtcgcctacaccttccactacggcaacagctcctgagttgcgcacggcaaaacgttcgcctacgcggccattgatataaacttcaccgctggttgcaccatagagcagggtgttgcctgcaatcgtgttcttttcggcttcgaagttgctgcggataggcggtaatacggcaatgcgtccgccactcaatcctttacccagataatcattcgcttcaccttccagcttgaaattgactcccggtacgaggaaggcaccgaacgactgtcccgcagagcctttgaatttcacattcaaggtatgttccggcagtcccttttctccgtgttttttggcaatgacaccggagagcatggcacctgtcgcacggtccgtattggcaattgtgtattccaatgaaacttctttttcgtgttctatcgcttcttgggcagcatcaatgattgccacatccttcactgtagaaataccatgatcctgatcgatgacgtgacggatggctgcactgttatccacgcgtgccagtagcttggtgaagtcaatcagagcgtgcttcggattcggatcgttttcgtcggatttgcgttcaatcaagtccgtgcgtccgataatatcatccattttggtgaatcccatttccgccagatattcacggacttcctgtgccaggaaggtgaaaaagttgataagatattcgctgcgcccatgaaagcgtttgcgtaattcctcattctgcgtggctactcctaccggacaagtattctggtgacatttgcgcatcatcacacatcccagcacgatcagggcggaagtggcaaaaccatattcttcggcgcccattaatgccattatgataatgtcgcgtccggttttcaattggccatcggcttgtaggacgacttgtccccgcagaccgttcagaaccaaggtttgctgtgtctcgctcagtcccagttccggagaaatgccggcgtaacggatggatgaagcgggagaggctcccgtaccaccctcggcaccggagatgacaatcaaatccgcttttgcttttgccacgcctgcggcaatggtacctacgccactttctgctaccagtttgacactgattttggcttgtggattaacgtttttcaagtcaaatatcaattgcgccaaatcctcaatcgaataaatatcatgatggggaggaggagagatcagtgagattcccggaatggaatggcgtgttttggctatgacgtcgttcactttgaatcccggaagctgtccgccttcccctggtttagctccctgcgctatttttatttgtatctcatcggcattcaccagatattcggcggtgaccccgaagcgtccggaagctacctgtttgatggcacttcgcatggaagtaccgtccggcagcgggtggaagcgggaagcatcttcgccaccttcacccgtgttgctgcgtccgtgaatggtattcatggcaatcgccattgcttcatgagcttccttgctgatagatccgaaagacatggcacccgtcacaaaacgacggagaatattctctatcggttctacctgttcgatggatataggattgcgacggaatcctaagaagtcacgcaggaaaataggtttctccttattgtctaccaaatgagtgaactctttgaatttcttgtagctgcccaagcgggtggcaagttgcaatgtactgatggtttccgggttccacgcatgtttctctccgtcctttcggaaggcatacagtccgttgttctttaataatggaaaattgaaagttgaaaattgagagttgccgtgcggtgcttcattttccattttcaattctccattttccattccttcaactccttcatcgtggaaagcgattgcgtctcttgccacttcctccaggcggatacctccgatgggggaaccgagtccgccgaaataagccttgctcaactcttcgctgagtccgacagcttcgaaaatctttgcaccgcgataagagcggatagtggaaatccccatcttactcatgattttgaacagacctttgcagatagatttgatatagtttttctcagcggtagcatagtccagttgaatatctttctcttttaccagcttgtcgaggatggcaaatgccatatacgggttcagtgcactggctccaaaaccgagtagtaaagcggcgtgcattacttcacgcatttctccgctctctacaatcaatgctgtctgcacacgtttgccgacagatatcagatggtgatgcacggcacttactgccagtaatgaagggataacggcatgagttgcatccacgtcacggtcggtcagtacaatgtagtttgctccgtccgtaactgattcctccgccattttgcaaaggttgttcagtgattcctgtaatccggctttccctttggatacttcaaacagcatcggtagttttacagtcttaaagcccttgtagcggatattgcaaagaatatccagctgtgtattgcttaaaatcggatgattcagacgtaccattttacaatgactctcgctgggagtcaggatattcatgcctaccgctccgatatattccgtcaaagacattaccagttcttcgcgtagcgggtcgatcggcggattcgtaacctgtgcgaattgttggcggaaatagttgtagagtagctgtggtttatcggaaagtacagccagtggcgtatcattacccattgagtggatgggttcggcacccgcgctcgccattggcataatcagccgttcgatatcttcttttgaatagccgaaagtacggagcatccggtcatagttttctacgtgatgaggcactttacgaccgcttttcagttcatccagttcgatacggttagtcgatagccatgtacggtaaggcttcgcttcggccagttgtttcttcaattcgccgtcatagtagatttctcctttctctgtatcgatcaatagaatcttgcccggttgcaggcgccctttttccttgatatctcccggttcaaagtccattacgcccacttcggatgccactaccatcgtatcgtttttagtgatcagatagcgggcagggcgcaggccgttacggtcgagcataccacctgcaaatcgtccgtcgctgaaaagcaaggctgccggtccgtcccaaggttccatcaggatagaatggtattcatagaatgctttcaggtcttcactgatcggattcttctcgttgaaagattccggtacgagcatagccattgcatgaggcagacttaatcctgacatgaccagaaattccagcacattgtccagagaagcactgtcgctcatacccggctgtatgatcgggcgtatttctttgatatctcccagcataggagtggagagtacgctttcacgggcttccatccatccgcggttgccacgaatggtattgatttcaccgttgtgcgccagcaggcggaaaggttgtgccagtccccatgtcggaaaagtgttggtgctgaaacgggagtgtaccagagccaagccgctggtgaagtagctattcgtcagatcaggatagtagttgcgtagctgcaatgacgagagcatacctttatatataatacttttggtcgagagcgaaacgacataaaaatcgtttctcgtcggaatagctgacaatctgactttattctctatccgtttgcgaatcagatacagtttgcggtcggcggtttccgtttccgtaaaaccggtaataaagacctgcttgatatccggttcgttagccagagccgcttcacctagaatttccggacaggtgggtacattgcgcagatgcatcaatgtaagtccctctttttctatttcttcaataatgatactaaaaatagctgcctgatctttctcgtttttcggtagaaaaagcagaccggtgccgtaccgtcccttttcgggtacggggatgccttgcagtaaaataaactcatgtggaatctgtaacataatacctgcaccgtcgccggttttgttatccgccccctcagcgccacggtgacgcatattctctaatacctttaaagccgactcaacaatgtcatgtgacttttctccgtgaatgttcaccagcataccaaccccgcaggcatcgtgttcatatgccgcgtcatacaagcccatttgtccaggctgtcgttggtaggggaattttcctgttgcgttgttaaaaagttcttgtttcttcattctttctagctttattgtatgataatacctatttgatgtatcaaattgttcggcaaaattaagaatttaatttcataatgatagcgtattgtttgttttgtgtgacacaaaataagaacctctttctttattcttttaatttgtaatcaaaatgctctgatttgcttataatttatcagtctgtccggttttattttatcctgattgtaatttgtttctttttgagcttaaaataatatattatttaacgttttgatgtgtttacaacttttttatgtgcttatgtcaaataaatattgaaaaagttatctttgtgtcatttggaatgtgtatatttgcacccgaaataaaaatatcataatatgtgtggaatagtaggctatattggtaaaagaaaagcctaccccatccttattaaagggctgaagcgactggagtatcgtggatatgacagtgcaggggtagcattgatcagtgataaccaacagttaaatgtgtacaagacgaaagggaaagtctccgaacttgaaaatttcgtcacacaaaaagatatttccggtacagtcggaattgcccatacccgttgggctactcacggggaaccttgttccgttaatgctcatcctcattactcttcttccgaaaaactcgctctcattcataacggtatcattgaaaattacgccgttctcaaagaaaaactccaagccaaaggctacgtctttaaaagtagtaccgataccgaggtgctcgttcaattaatcgaatatatgaaagttaccaatcgggtcgatctgcttactgccgttcagttggctttgaatgaagtgattggtgcttatgcgattgcgattcttgataaagagcatccggaagaaatcattgcggcccgcaaaagcagtccgctggtggtaggtattggtgaagatgagtttttccttgcttcggatgccacaccgattgtagaatatacagataaggtggtatacctcgaagatggtgagatagcggtgatcaatcggggaaaagagctgaaggtagtcgaccttagtaatgtggaaatgactcccgaagtgaaaaaagtagaattgaagcttggccagctggaaaaaggaggttatccgcatttcatgttgaaggagatttttgagcagccggactgtattcacgattgtatgcgtggacgtatcaatgtggaagccaataacgtggtgctttcggcagtaatagactataaagaaaagttgctgaacgccaaacgctttattattgtggcttgcggtacttcgtggcatgcgggattgatcgggaagcatctgattgaaagtttttgccgtattccggtagaagtggagtatgcctccgaatttcgttaccgtgatccggtgatcgatgagcacgatgtggtgattgccatttctcaaagtggagaaacggcggatacgctggcggcagtggaactggcaaaaagtcggggtgcatttatatatggtatctgtaatgcgattggttcctccatcccccgcgctacgcatacggggtcgtacatccacgtcggaccggaaatcggagtggcatcgaccaaagcatttaccggacaggtgactgtgctgaccatgctggcattgactctcgcccgggagaaaggtacgatagacgagacacaatacctgaacattgtacgggaattgaatagcattcccggcaaaatgaaggaagtattgaaactgaatgataagctggcggaactgtcgaaaactttcacctatgcgcataactttatttacctcggacgcggatatagttatccggttgctttggaaggtgcattgaaattgaaagaaatatcgtatattcacgccgaaggttatccggctgccgaaatgaagcacggaccgatagccctgattgatgccgaaatgccggtagtagtcattgctacccaaaacgggttgtatgagaaagtacttagcaatattcaggaaatcaaggcacgaaaaggaaaggtgattgcatttgtaaccaagggcgatacggtgatcagtaaaatagccgattgcagtatcgaacttccggaaacaatcgagtgccttgatccgttaattactacggtacctctccagttgcttgcttatcatattgcggtatgtaaggggatggatgtagaccaacctagaaatttggctaagtcggtaacagtcgagtagtttaaaatgtaaatagtcaaatagtaagagatagattaatggaacaattgaaacatgaatgtggcgttgccatgatacgcctgctccaacccctggagtattacgagaaaaagtacggaacatggatgtacggtctcaacaagctctatctgttgatggagaaacagcataaccgggggcaggaaggggcaggactggcatgcgtgaagctggaagcaaatccgggtgaggaatatatgtttcgcgaacgcgcgttaggttccggtgccatcaccgaaatcttcgaagctgtacagagtaacttcaaggacctcactcccgaacagttgcatgatgcggcatttgccaaacgtactttgccctttgcgggtgaagtatatatggggcatctgcgttattctactaccggaaaatccggaatctcgtacgtacatccgtttttaagaagaaacaactggcgtgctaaaaatctggctctctgcggaaacttcaatatgacgaatgtagatgaaatctttgcccgcatcaccgctatcggtcagcatccacgtaagtatgccgatacctatatcatgttggaacaggtggggcatcgtcttgaccgtgaagtggaacgcctcttcaaccttgctgaagccgaaggactgacagggatgggagtcacccattatatagaagaacatatcgaactggccaacgtattgcgtacttccagccgtgagtgggatgggggatatgtgatctgcggtctcaccggaagcggcgaatcttttgctatccgtgatccgtggggtattcgtcccgctttctggtatcaggatgatgaaatagccgtactggcttctgagcgtccggtgattcagactgctttgaatgttcccgtagaaaaaatcaaggaactgcaacccgggcaggcattgctgatcagcaaagaaggcagactgcggacttcacaaatcaacaggcctcgcgagcggcacgcctgctcgttcgaacgtatttacttctcccgtggcagcgatgtagatatctataaagaacggaaactcttgggagaaaaactggttccgaatattctgaaagccattaataacgacttggaccatactgtattttcctttatcccgaatacggccgaagttgccttctacggaatgttgcaagggctggatgactatctgaatgaagagaaagtacggcagattgcggcattggggcatcatcccaatatggaagagctggaggtcattctttcccgccgtatccgcagtgaaaaagttgccatcaaagatattaagctccgtacattcattgccgagggaaacagtcggaatgacttggctgcccacgtatatgacatcacgtacggaagtctggtttccggtgtcgacaatctcgtgattatcgacgatagcattgtgcgtggtactaccttgaagcaaagtatcatcggcattctcgaccgtcttggtccgaagaagatcgtgattgtatcttcttctccacaagttcgttatccggactattacggcatcgatatggcgaagatgagcgaatttatcgctttcaaagctgccatcgagcttctgaaagagcgggatatgaaggatgtgattgctgccgcctaccggaaatcgaaagatcaggtaggattgccgaaagaacaaatggtgaattacgtgaaggatatctatgcgccgttcaccgatgaagaaatatctgccaagatggtagaactcctgacaccgaagggaacgaaagcgaaagtggaaatcgtctaccaaccgttggaaggactccatgaagcctgtccgaaccatcaaggagactggtacttcagtggaaactatcccacgccgggtggtgtgaaaatggtgaatcaggcatttatcaactacattgagcagatgtatcaattctaacaaccatacaacgattcaaaaataagaatgagaaatgtgacattaatccttgacgacgggagccggttttccggtaagtcgtttggctacgagaagccggtggcgggcgaagtagttttcaacaccgccatgaccggatatccggagagccttactgacccttcctacgccggacagttgatgactcttacctatcctttggtgggtaattacggagttcctccttttaccatcgaacccaacggactcgccactttcatggaaagtgaaaagattcatgccgaagcgatcatcgtaagtgactactcttctgagtacagccactggaacgcagtggaaagccttggcgactggctgaaacgtgagaaagtaccgggcatcacaggcatcgatacgcgcgaactgaccaaaatacttcgtgaacacggagtcatgatgggacgtatcgtcttcaacgatgaaattgtcggggaaattgacaatggacaattgccaatggacaattacgctgccgttaattacgtagaccgtgtttcctgcaaagaaataatctcctatcttcccgatggaacatcccgttcttttccattaaccatgcccgtcgcgcagcttaattgtcaattgtcaactgtcaattgtcaattaaagaaggttgttttggtggattgcggtgtaaagaccaatattatccgttgcttgttgaagcgtggtgtagaagtgatccgtgtaccttgggattatgattttaacggactcgaatttgacgggctgtttatctccaacggaccgggtgacccggatacctgcgacgcagctgtacagaatatccgcaaggcgatggcgaacgaaaaacttcccatctttggaatttgcatgggcaaccagttgctctcgaaagccggaggggcaaagatttacaaacttaaatatggacaccgtagccacaaccagccggtacgcatggtgggtacggaacgttgttttattacttcgcagaatcatggttatgcggtagacaataatacgctgggggcagattgggaaccgctgttcatcaatatgaatgatggttctaacgaaggaatcaaacacaagaaaaatccttggttctctgcacagttccatcccgaagctgcaagtggtcctacggatacggaattcctgttcgatgaatttgtaaacctgcttaaataaccgactatcatgaaagaaaatataaagaaagtattgctgctgggttccggtgccttgaaaatcggtgaagccggtgagtttgactattccggttcgcaggcactcaaagccttgaaagaagaagggattgaaaccattcttatcaatccgaatattgctaccgtacagacatccgaaggagtggcagatcaaatttacttccttccggtcactccgtattttgtagagaaagtaatccagaaagaaaagccggaaggtattatgctggcattcggcggacagaccgcgctgaattgtggagttgctttatataaagaaggaatccttgaaaagtataatgtaaaagtactcggtactcccgtacaagccattatggatacggaagaccgtgaactctttgtacagaaactgaacgaaatcaatgtcaagaccattaaaagtgaagctgtagaaaatgcggaagatgcccgtcgtgcagcgaaggaattgggatatccggtcattgtccgtgcggcttatgcgctgggtggcttgggctccggtttctgtgacaatgaagagcaactggatgtactggtagaaaaagccttttctttttctccgcaagtgttggtggaaaaatcgcttcgggggtggaaagaagtcgaatacgaagtcgtccgcgaccgcttcgacaactgtattacagtttgtaatatggagaactttgacccactggggattcataccggtgagtctatcgttattgctccgtctcaaacactgaccaacagtgaatatcataaacttcgtgaactggctatccgtattatccgccacatcggtattgtcggcgaatgtaatgtacagtatgctttcgaccccgaatcggaagattatcgcgtcatcgaagtaaatgcccgtctttcccgttcctcggccctggcctctaaggcaaccggatatccgttggcattcgtggctgccaaactgggactcggctacggactcttcgacttgaagaactcggtgacaaagactacttctgctttcttcgaaccggctttggactatgtggtatgtaagattccacgttgggacttgggaaaattccatggggtagacaaggaactgggttcttccatgaagtcggtaggtgaagtgatggcaatcggacgtacttttgaagaagctattcagaagggcctccgtatgatcggacagggaatgcacggattcgtggaaaacaaagaactagtaattcctgatattgacaaagcactgcgcgaaccgaccgataaacgtatttttgtgatctcaaaagcctttcgtgcaggatacaccattgatcaggtgcatgaactgacgaagattgacaaatggttccttcagaagttgatgaatataatgaagacttcggaagaaatgcacgaatggggaaataatcataaacagattgccgatctgcctgtggaactgcttcgcaaggctaaagttcagggcttttccgatttccagattgcccgtgctatcggttatgaaggtgatatggaaaatggaagcctgtatgtccgcaagtatcgtaaggctgccggtatccttccggtggtaaaacagatcgatacactggctgccgaatatccggcgcagaccaattatctgtatctgacctatagcggagtggcaaacgatgtacattatctgggtgaccataaatccattgtcgtattgggttccggtgcctaccgtatcggttcttctgtagagtttgactggtgcggtgtgcaggctctgaataccattcgcaaggaaggttggcgcagtgttatgatcaactataatccggaaacggtatctacagactatgacatgtgcgaccgtctctactttgatgaactgacattcgaacgggtaatggatattcttgaactggaaaatccgcacggtgtcatcgtatctaccggtggccagattccgaataaccttgccttgcgtctggatgcccagaacattcacatactgggaacaagtgctcagagcatcgacaatgccgaagaccgtgaaaagttctcagcgatgctcgaccgtattggtgtagaccaaccacgctggcgtgagttgacatcgctggaggatatcaatgagtttgtcgatgaagtcggtttcccggttcttgttcgtccgtcttatgtgctttcgggtgctgcgatgaatgtctgctccaatcaggaagagcttgaacgcttcctgaaactggctgccaatgtatcaaagaagcatccggtggtagtaagccagtttatcgaacatgcgaaggaggtagaaatggatgctgtggcgcagaatggcgaaatcatagcctatgcaatcagcgaacatattgagtttgccggtgtacactccggtgatgccactattcagtttccgcctcagaagttgtatgtggaaactgtccgtcgcatcaaacgcatcagccgtgagattgccaaggcattgaatatttccggtccgttcaacatccaatacctggcaaaagataatgatattaaggtaatcgaatgtaatctgcgtgccagccgttctttcccgtttgtcagcaaagtgctgaagataaacttcattgagctggcaaccaaagtgatgctgggtcttcctgtggagaaaccggaaaagaatctctttgaactggactatgtgggaattaaggcttcgcagttctctttcaaccgtttgcagaaagctgaccctgtattgggagtagatatggcttctacaggtgaggtcggctgtatcggaagtgacacttcctgtgccgtactgaaagccatgctgtctgtcggctaccgtattcctaaaaagaacatcctgctttctacgggtacaatgaagcagaaggctgatatgatggatgcagcacgtatgttggtaaacaagggatacaaactctttgcaaccggcggtactcataaaacctttgctgagaacggcattgaaagtacgcttgtctactggccgagtgaagaaggacatccgcaggcattggaaatgcttcataataaggaaattgacatggtagtcaatatcccgaagaacctgactgccggagaactggataatggatataaaatacgtcgcgcggctatcgacctgaacgtgccgttgataacgaacgcccgtctggcaagtgcatttatcaatgctttctgtacgatgaccgttgatgatattgccatcaagagctgggaagagtataagtaagaaataataaattgttgtataataagttggaaaagtcgttcccgtgcattcgggggcggctttttttatgaatttctgtttttgggatggtgtcactataagcatgggatagtgtcactatcctgtcagtatgcttacactatccttcctgtatagtgtcactatctttttttaatgtttataagttgcatgattggacaaattggtgtaaattgcgcaattatttcacaaatattctaaaacaggggagtaatatgagcatggataatcatatcgtaattatggctggtggcatcggtagtcgtttttggccgatgagtacaccggaatgtcccaagcaatttattgatgtaatgggatgcgggcgtacgttgattcaactgactgctgatcgttttgatggcgtctgtccacgggaaaatgtgtgggtagtgacgtccgagaaatatattgatatcgtccgggagcaattgccggagattcctgaaagcaatatccttgcagagccttgtgcacgaaacactgctccctgcatcgcctatgcttgctggaaaatcaagaaaaaacatccgaacgccaatgtggtggtgactccgtcggatgcattggttatcaatacaggtgaattccgccgggtagtagagaaagcacttcgttttactgacaacagcagtgctatcgtaacgctgggtatcaaaccgactcgcccggaaaccggatatggatatattgctgccggagatcagatcatgactgataaagagatttttacggtagatgcattcaaggaaaaaccggacagggagactgccgacagatatctggccgagggtaactacttctggaatgcaggaatttttgtttggaatgtgcgtactatcacttccgtgatgcgtgtatatgctccgggcatagcgcaaatcttcgatcgtattttccccgatttctatacggagaaggaaaatgaaacgattaaaaagctgttccctacctgcgaagctatttccatagactatgccgtaatggaaaaagcacaggaaatctatgtacttccggcttctttcggttggtcggacttggggacctggggagcgctccgcggactgttgccacaagataaatccggaaatgctacggtaggggccgatgtccgtttgtacgaaagcaagaactgcatcgtacataccagtgaagagaaacgggtcgttattcagggtctggatggatatatcattgctgagaaagataatacactgttgatttgtaaactggaggaagaacagcggataaaggagttttcaaagtaatccttaattcttttgatattcctgaggcgtcattccagtcattcgtttgaaaaacttgctgaagaaagacggattgggaaagtttaattcatctgatatctgataaacaaggcggttgctatgttttagcaatactttagcctctagtataatggactggtttatccagtccattactgtttgctggctggtttgccggattacagtgttcagataacggggagtgagacaaagtttatccgcatagaaactgacattccgttctgtcttgctataggtgttgaccaaagaaatgaagcgctgaaaaatgtcgttttgatgggttaatggactgagttcggcctgccctttgcttttggctatatactctatattatatagtaatcctaccagtaaatgctgaatgacctcttttctgaatataggttcttgcaatacactccacatgaccgtcacaaaattctctatctgtatttgttcttcggtagacagtggaaacaggagatttttcttttgttggaggaaatgggtgaagaattcttcctttccggatatcggcagaaagttcaggtctactgccatcatgtgagcatcaaaatcgtgagatacttctatgatttgtatgatagagttgggagctatcagggatatatggtcgggcaggaaaatatattcgatcagattgattaaaacacgtgccgagccattagtgacaatagcaatacggccttcctgtagccggtacggttgtccgacactgaagatagtcgtttccatttttgagaaacttgtcacaaatccgaattcggcattgatgaagcgaaattcgttgtgacgtactatatttatatctttcaacagttggaggcctaattccatcggtttcttctgttccattttctcagttcttttccggcaaagataagaaatagcccttgaatcttctctttttttaggatgaatcgaactattgggacatattttccaactatcagaatgtgaaactattacttaaaggtctatctttgtcttttgaagaattcatagaaaaaatgcgtatgaaaagaattatttttagtctttcgcttttactgttcatgcccggaatgtatgggcagaccgggcatataacactagaagaatgtcagcaaaaaacgcaggataactatccgttggtgcgtcaatatgatttagtggagaagacgaaagaatataatctggaaaatgcggcgaggggatacttgcctcagtttgctctttcggcaaaggcgtcttatcaaagtgatgtgacggagttacccattgccattcccggtgtggatatcaaagggatggccaaagaccagtatcaggtgatgctggagttacagcaacagatatgggatggcggaggaatccggatgcagaagaaaaaggctacggcggaagcggagattgacagggaaaagttgaacgtcgatatgtatgcgttgaatggccgtgtgaatgatttgtattttggaattcttatgttggatgagcagttggctcagaatgccttgctgcaagatgaactgggacggaacttccgtcagattacagcttatgtggacaatggaatagccaatcaggccgatctggatgctgtgaaagtggagcaattgaatacccgccagaagagagtggaactgacttcttcccgtatggcttatttgaagatgctttcgttattgatgggagaggtgctttcgacggagacagtattggagaagcctgttcctcaaaacgaactgtcggctgtcagtgagattcgccgaccggaactgtcgtggtttgacgcacagggagccgttttgcaggtacaagagaaagccttgaatgtgcgccatcttcctcatttcggattgtttgtgcagggagcttacggtaatccgggattaaatatgctgaagaatgaattttctccttattatattgcaggtatccggctttcatggaatttcggaagtctgtatacgttgaagaatgaccgtcgggtgattgaaaacaaacggcagcaactggatagcaatcgggatgtgtttctttttaatacgagactggaaatgacgcagcaggatcagtctgtccgttcgttggagaagcagatgcaggatgatgatgaaattatccggttgcgtacgaatattcgtcgggctgcggaagccaaagttgcgaatggtacgttgacagtaacagagatgctcagagaactgacgaatgaaagtcttgcccgtcaggcgaaggcaatgcatgagattcaaaggttgatgggtatctatcaattgaaatatactactaatcattaataaaaatctgtcggatatgaaacgaatgacaaaaataggaatatacgggatggcagtatggttgctttctgcctgtggaaacggaacgcccgattatgatgcaacgggaacctttgaggctacggaagtgatcgtttccgctgaagcggcgggaaaactgctgcaactggaagtggaagaaggaacaagattgaaagccggcgaagcagtagggctggtagataccgtccagttatatctgaaaaagttgcaactggaagcaagtatgaaatcggtggaaagccagcgtcccgatctggccaaacagatagctgctaccaaacagcaaattactacagcgcaaagggaaaagaagcgggtagagaacctgcttgttgccggagctgccaatcagaaacaactggatgactgggatgcacaggtaaccttgcttcagcggcagttgattgctcaggaatcctcattgatgaagagtacgaacagtctgacggaacagggaaattcggtcggtatacaagtggcacaggtggaagaccagttgagcaagtgccatattcagtcgcctattgaaggcacggtgctggcaaaatatgcggaagcgggagaactggcatccgttggcaaaccgctgtttaaagtgggtgaggtagaccggatgtatttgcgggcttatgttacttcagagcaattgtcccaagtgaaattgggggatgaagtgacggtgtattccgactatggaaattcggaacagaaagcctatcccggtgtggtcacttggatctcggaccgttcggagtttacccccaaaacgattctgactaaaaatgaacgtgccaatctggtatacgcagtgaagattgccgtgaaaaatgacggttcgttgaagattggtatgtatggaggtgtggtatggaaaaaggagaacccatagtcgttgtaaaagaagtcagcaagagctacgggaaagtagaggcactgaaagagatttcttttgcggtagagcagggagaaattttcgggctgatcggtcctgacggggcggggaagagtaccttattccgcatcctgaccactttgctgctggctgataaaggtacggcaactgtcaacggattggatgtggtgacggattacaaacagattcgtacgaaagtaggatatatgcccggacggttctcgctttatcaggacctttctgtagaagagaatctggaattttttgctacggtatttcatacgtcgatacaggaaaactatgatttgattaaagatatttatcagcagatcgagccctttaagaaaagaagggcaggtgctttgtcgggaggtatgaagcagaagctggcattgagctgttccctgattcataaacctgatattttatttctggatgaaccgactacgggtgtagatcctgtgtcgcggaaagaattttggcagatgctccgtaatttgagaaaacaggggattacaatcattgtttccactcctattatggatgaggctcgtcaatgcgaccggattgcttttattaatcacgggcaggtgcacggaatcgatacgcccgaacggattcttcagaagtttgcttccattctttgtccgccacccttggaacgggaggagacgcaacagatggtagctcccgttatcgaggtggagcagctgaccaaatccttcggacattttacggcagtcgatcatatctcttttcaagtgcagcggggagaaattttcggttttcttggagccaatggagcaggtaagacgactgcgatgcgtatgctttgcggattgagccgtccgacttcgggagtaggaaaggtggcaggctatgacatctttcgggaagccgaacaagtcaaaaggcatatcggatatatgagtcagaaattctctttgtatgaggatcttaaagtctgggagaatatccgtctctttgccggaatttatgggatgaaggagatggagattgaagaaaagacagatgaattgttagaacgcctgggatttgcagacgaacgggatacgttagtgaaaagccttcccttgggttggaaacagaaactggccttttctgtctctatcttccatgagccgaaaatagttttccttgatgaaccgaccggaggagtcgatcctgctactcgcaggcagttctgggagctgatttatcaggctgccgatcggggaatcactgtatttgttaccacgcactatatggatgaagcggaatattgcaaccggatatcgattatggtggacggtcagatcaaggcactggatacaccggcccggctgaaagaacagtttggtgtggagacgatggatgatgtgtttcaacaacttgcccgccatgcggtgcgtaaagcggattgattatgaaacaatttattgcttttgtaaagaaagaattttatcatattttccgtgaccggcgtaccatgctgatcctgttgggaatgccggtcgtagagattattttgtttggttttgccatcagtacggaggtgaagaatgtccgactggctgttctcgatccttcgaatgatatggtgactaggaaaatcatagaccggctggatgcgagtgagtatttcacagttactacccgttttcattctccgcaggagatggaaactgccttccggaaaaataagatagatatggcaattgtatttggagagcgttttgccgacggactttatacgggagatgcccgtgtacagctgatagtcgatgcaaccgatcccaatatgtctacctcgcagagtaattatgcagccagcattgtttcttcggcagggcaggagatgttgcctcccaatgtgtccgtttcgcgtttgactccggatgtcaaattgctgtataatccgcagatgaagagtgcctacaactttgtgcccggagtcatggggctgattttaatgttgatttgcgcgatgatgacctctatttccatagttcgtgaaaaggagacgggcacgatggaagtattgctggtatctccggtaagaccattgtttatcgtgctggccaaggcggtaccttattttgttttatcttttgtcaatctgacaaccattttgttactctctgtctttgtgctggatgtgccggtagtggggagtttgttttggctggtgatggtgtctttgctctttattttcgtgtcgctggctttgggcttactgatttcttccgtgacaagtacacaggtggcggccatgctggcatccggaatgatattgatgatgcccaccatggttttgtccggaatgatttttccggtagaaagtatgccggtgattctccgggccatatcggacattattcccgcccgctggtatattcaggctgtgcgcaaactgatgattgaaggagtgccggttgtactggtacttaaagagattggtattttgttgctgatggcagtagtgcttattaccatcagtatcaggaaatttaaatatcgattggaataaaggaatttattatgataaaatttctgatagaaaaagagtttaaacagttgcttcgcaattcgtttctgccgagattgattcttatctttccctgtatgatcatgttgctgatgccttgggctgtgaatatggaaataaagaatatccagctgaatattgtagacaacgatcattcggtgatttctcagcggctggtgaataagattgcggcttctacctatttccgtctgacggaagtgccggcatcttatgaggatggattacggaatattgaactgggaacagcggatattataatggagatccccaggcacctggagcgggactggatgaacaaaggagaagcccatatactgattgcagccaattcggtaaatggaacgaaaggagggctaggcagttcttatctgggcactattatcaataactatgcagccgagttacgtgcagaatatcctgatgccgtatctgcgtcgggcattgccccttccattcgtatcgatatgcagggattatttaacccgaatctgaattataaactttatatgattcctgctttgatgggaatgttgttgactttgatatgcggatttttgcccgccctgaatgtggttagtgagaaggaggtaggaacgatcgaacagattaatgtgactcccgtaccgaaatttacttttattctggctaaacttttaccttactggatcacaggctttatcgtattgactttgtgctttttgttagcctggttgctttatggaataactcctgtagggcatttcatcgtgatttattttttggcgattttgtttgtatttgttatgtccggtttcgggctcgttatatccaattattcggcaactatgcagcagtctatgtttgtaatgttcttttttatgctgattctgatgttgatgagcggattattcactccggtgagcagtatgcctgaatgggcacaggtgattacttatttcaatcctttgaagtactttatggaaggaatgcgtatggtatacctcaaaggaagcagcttgttggaactgctgcctgaaataggagtcctgcttctttttgcactgggtttcaatacctgggcggtgatcagttatcggaaaaatcaataattgagaatttgattatataaaaaacagctcttatccttattggttggaaaagagctgtttttattattgttttcaccccttgggatgaatcgtggttactgtattattttacttcgatttgcttttcggccttcttcacttcttcttcagaaatcttaggaagttggacgctcaaaactccgttttctactgcggcagaaattttttctttatctacattatccggcagaatcatcgtctgctgaaacttagaataagagaattcgcgacgtagatagcgaccttctttcttctcttctttgttttcagtcttcttctccatagagataacgaggttgttgtcttcatcaatgcgaacattgaagtcctcttttgtcattcccggagcagccagttcaactttgtattctttttctgtttcaaaaacattgattgcaggtgcagttgcatttgcttttaccatccaatcgttatcaaagaaatcgttaaaaatacttggtaaccaactttgagttcttctaacaggcatcataatcttagtctcctatcttttagttaaacattcggtttattcactcttgaatttcggttcgttgctttccgcagaggggagcatcccgactcttactgtctgctttcgaaccgtcgttcactgctattagtgcaaaccttatgccaaaagaattctgagactaaaaatgtctatttgtcattttaataatgccaattttgcctgtttggtgacaaaatgtaatcgcgatatatttattttatataatatagatattaatttgataatctatttcttatcaatgagtttgaatcttaatcttaaagtttgtctttcttcatcgtaatcatgactgatgattttgaaggttcctacttctgaggtattggacacgtgtaaccctatacaggcgcaggcgtcataatctcctatgcgtataatacgaagagtctcactggcgtcagcaggaagtttgctcagatctacgatggctttagcctgctcatgagtcataaactcaacagttacgggcagattttgactgataacttcgtttaccttatcttctatcgcttgtatctcctcatctgtaggacaagcaggaagaatatagtcgcacttactctttttcctttctatatgggcatttcttgagcgagggcaaccgaaagtttttaccatagtggcatttagtaaatgctctgctgtatgcataggtgcgattgacacatcctgaaacttgggacttggtttatttatttctatatttgtttccatattaattgatattgatgtaattaacagcgcaaagataatgaataatatggataagaaggtactaatctattgtcgtgttagtacgcaacaacagacaactgatagacaaaaagaggaattgttgaagtttgcagcagaaaaccattggaacgttgaagaagaggatattttcatagatgttattagtggttttaaaaagagagagttccgtcctgaatatgtgaagatgcttgaaagagtcgaatatggggatattgatataattttattctctgaattttctcgtcttgcaagaaatgctacggagttattagaacaaatcaaattgtttatagataaaggtattaacttgtattttgataaacaaaaattgtgggtaagagatagtaataaagatgtaggtagtattattttattgcatgtgcttgctgttatgtcaagctatgagatagaattgtttgttgaacgttcattaagcggcaagataacaaaagttcaagctggtcatggaggaggggatgaacgtgcgtatgggtatatgcacaatgaaaataaacagattgttataaatcctatcgaaagtaagattgttgcccgtatttttgaaatgtatgttggtggatattcttcaattcaaatatcagagatattgaatgctgagaaagtacctgctccatacataagaaaattgaatgagtacaagaagaatagagaagcaaaaggattggaggtgaaagagtataaatttgatacagataatttaaaatggcgtatttctacaataaacagacttatgcacaatgagttatataaaggtaatcgtagaataacattttataaaccagaccctaccaatccacttccgttatccgaaaggcaagatagagagattgtttatgaatattcggaacatgtggaaagtctgcgaattgtatcagacgagttgtttcagcaagcccaagataaactttccaaagcgcattataataagaataatgcagtcaggcatgagaatttattgaaacatttaatggtatgtggcgaatgcggtgctaatttttctgtagggaaatcaaatgaaacatctaaaaattatatcagtggtggacgtacttacaaatgttatggtagagtgaatcgtaaagataaaccacgaacatgcacgaatggggcagaacttcgacaatggaaattggatggacttgttttacagttgtcaattcaaatgtttgctgagattaatattcagcagagcaatattttaaagatagaaaatttagggaaagaaatcgaagagttggttcaaataaaatcatcaaagaatacagaattggttgaagcggagaatctttataaaaagacacttaaacgtcttattgcgattgaagacgatgaggttgcaaagaatttgatttcagatgcaaaacataaatatgatgaaactaaaaacgtgttgaacaaaactatggataaattgtcacgagaaatcacaacaaagagaattactattgataatttgaggcgtttgaatgccaatcctttgttgattaataaaatggatgagattaggaaaaatagggatttggtaaagactatggttgatgaatatattgataaaattactatatttcgtttacatgaactttggttgttggtcgtagtatcttataaaggaggtgaggagatgtggggaacaattaaatgcgctcgttataaaaaggaggagatgttttatgatgaattgcattgtcattatggtgttgaatttcaggggtggttacttaataatacggaacattgtttttcgtatgataaaagtacacgtattattacttatcatggtggaagtaaaatatatgtggagtttaaatcaggtgagtatgattatgatacatttaatcaaatgatacaagaaacaggatggatgggatgtttccctttttatgcttatgaagatagtgataaagatttaagcgtaccttttaatgaaaaatttagaaaatctttacaagagaacagagttgattggaaagcacgcaatgacaaggtcttggaacgtttattatccgagtcataaataataatattcctaccgccgtaacccctcactcagggggaggatttttgtagtccccccctatagtttgtaacgggtggatttctatagtggaatcctatcctgctattgccgaaatagggttatacagatataagccaacagtatttttagttgattgattattttttatattggttggaatgttgttttctttacaccattcatataatttactttttcctacttttaaattcagtgctttaaaggttgatagattttcttttagggatttggaacaatcataatataagccaattaattcattattgattttcccttttaccatatttcgtacagtcttagctgaaagattgtatttgatgcaatattgagggtttattatccattttcttttttctgtctgctgttgtttaatcattgttgagtatttgtcaatgttttcattatatgcattttctgcgatatcatataattcttgtttgcttattgggtccttgctgttattgatgtaatagtatagttcgttggctaaacagtgcagcaaatgttcaaattcaatttgtgggtatatatatttgcgtactatagcatttaaaaagagtttttttctacgcccgttcccgtctttaattttacatactctgttggagtaaacacaattaccattattaagttttgttttttccttgaaccaatatcttttgatacagcaatagttttcaggtattgtaatatatggaatatcttcattggcttcttccaaattattttcaaagaatggatatttttctctgtatttttctattaagtctttatgggaaaggttccaaaaattggtaatatattcatggtcctttatttcaactacaactttatgtctcttttccatttgtaactgtatattgtatggtgttggcttttcttttatactgttagaaatggaaatatcatcataattataaatgataagattgtttataagtttacaatttgcgtagctccctaaataaaattggtagattgctctattatgattatctaattctatatttgttataatattatcatatagtatctgatattgattttgatttagtggtgtattgaaaatgtatagaagtctatatctgtttcctttagtaatatgtgaaaatgtggtatacgcaatgcttggctgatatttcaatgttactaataattcatcgaatgataataatgtattatcaatatcaaatactattatgttagtatgtaaagccctttctttcttcttataaccaaagagggattttatttccttgtcgatatatgtgcaagagaatatatatccttgttttataaattgctccaattcagaaatagtaatttccttttcttcaaaggatattttgttgtagtctttactggtaggtttttctgtgtaaccattgacggaaatcatcagtttaaaagagaatttttcatttttgtacatgttaaggttgatattattgtgtgacttgtacgtgtcacttatttaggatgttaaggtttgatagttgaacaaaggaagcaatgtaaccttaacaaaccattacttccaagtatgcctactttcaactatataatataagtatattttgtttatgcaaatatacgactttctaatatctattaccaccttttaataagaaattttgcctgaaaagccctcaaaaagtacaagtatggtataaagtgtcttattattatctgatttttgcgatgtactatcaatttgttgtaatacaatgtgttatatgaaatataagtgactggatatatatccgaatgttaggtagcacactgtttgctatttattttttgcccctattccccgattttgacaaaagggttccttttcgaatgatgcactttgagttttgaaaagttttttcgttggataatccgtaatttcgtaaagaaccgtaggaaatcccaagtatatcaggcgaaaaatattcaaaaacattggctatgcttccgaaatagtggtgggtgtcattctcttttatataaagatgaattactgtccgttctttcttctctttttcttccataatgcaatagttttttgcaaaaatagtaattgtgtgacataaaatgaataaatgtcatacttttaactatctctagtgtaaataaattgcatgtattaaatatatgtcatatctttgcgttgtgattaaaacgaagacgatatgaaacggtataataaaagacaagtgatgaaagatgctcatagactttacaataacgattttcaacgcaggggacgttcttggtcggagtgtcttagagcagcttggagttgggaacgggatgcagtcaaagttctcgaagaaaaagcagcaaggcttgatgcaatgatagccgcaagttggaaagcgcacaacgaaagaaaagaagccaagacaaatgagaattggtataaaggaattgattcagaaactctttcttatgcaatgggatatggaagaggtaacaatttctattgtggtgactaattaaaagagttttttaatattcactaatataacttttgaatatgtgttgattatcaatggtttaataataaatgggttcgtgttagattcaaaaacaatagatttcaattaaaaaagaatattatgagtttgaaaaatagctatgttacttcggattatatggaatgggattcaatgttatcattagttagaaagttgtatcgtgacaaagaataccgtttgtctttgttgattggctgtggctctttctttggtttgcgtatatcagaccttttaactttaacatggtcaatgttattagacggtcactcttttgctattatcgaaaagaaaacgggaaaaagacgtgaaataaaaataaattcaaattttcaaaagcacattgctgattgttgtatggctttaggtgtaacagataaaaatgagaagtgctttattagccgtaaaaagacagtgtatagtacgcaaagaattaatgtgttattcaagtcgataaaatcaaaatataatttgaaaattgaacactttagtactcatagtatgcgaaaaacgtttggcaggagagttgttgaggctgctggggagaattcagaatttgctcttatcaaactgtcggaattgtttaaccatgctgatgtaatgactacacgtaggtatctgggattacgcacgcaagaattgctagaaacgtatgatatgttaagtttctgatataaaagctatacctttgtgaaaaataacagctcacaaagaacgttcttatctaaactttctataactttgcattgctatcaatgatagtgtacataatgtaggaagcgtttagtagttccttaccgatgaatctggacaattcaagtgtaagagggatataagacgttcttcctttggtttgttatatatgttctccaataacatatacagccaaaggtgtgagctgttttttattcacttacacgggcagtccagagcctatcggttgaatactaacaggctcacacttcttttttataatcttccctttagagcctatgggtattgtcaattaaatgcatttatgaaaaaaattattagttctttctttatgttttactttttatgtataaatgttcatgctcaaagttttgaaaactttgtaaatactacggaaggagttgagtttggagttagagatgttgtgatatttcgcactaaatcagctttggataggtttgatttacaggggtttaaatctgtggattatgcgattgatatagcctgtagcgtttccaatttatcttttcttaataatttggaatatgtcaaaggattgtctatatatgggaaaaacgttatatcccttcagggagtaaataacataagaaagattgggaaaggtggattatatattagtgaagttaatatatccgatttggacggctttcaaaatttggagattattgagggtagtttggatattaaacattgtttaaatcttaaatcattaaatggattgcagaaactaaacaggtgtggtcagctatctgttaagtattgcccttcacttatatctttgagagggttggaatcgcttaaatatgtgtatagtatcgaatttgatggatgtgagaatctttcaacaattagctcgttgtgtggtttaaatgcaattgggtgtgtaattgaaattcttaactgttctaatttacaagctttgacaggtttggaaaatgttcatagttttggagttcctaaatatggtcactctaatatgacaccacaattaataattgggaattgtaaaaaccttaaagatttttcatcattaaaaaatataataacacacttgcctgaatatacaaatttccatgtagaatcatttgagggtaagcgtttgactgttgaacagatacaaaaaaaacattcaatgcaggttaggaaagaaaatgagaatgcaggagcgataggggtgagttcccaatctattacagaaccacgacatcccgaagggaaaatgggattgctgaattttttagcaaagaatatgaaataccctactttggcacaagaaaatagtataaaaggaaaagttgttgtacaatttgttgttaatgaagatggtaaattatctgattttaaagttattaaaagtgtacatcaatatcttgataatgaagcgttacgtgtagtgaaattattacctaaatttattccagcattggatgagcaaggtaatccagttaaagcttatgttacaatacctttgatgttcggaacaaattaatctatataattataaaacttttatcaatggaaacaacaaatattttatcattaagtcggaataatgaagagttggcgttaaaattgaatagtaataactatttggttctccacagttcgttatatgtaggatatttttttgaaacagcaatgctgttattacttttgactttgataggatgctcttctaatccgaaagaaataaagattacggaagaattctctaaatcaattcaaaaatatgatgaaatagcaaatttttcagaaggcttggcacgagtaaaaggagttgagggctatggttttattgataggaatggtgtagaggttattctctgtagttctatatatgataatgtagagcacttttcaaatggtttggcgcaagtatggaaaatggataaaggagttggatttattaacaaagacggtgtagagataattccttgtggtttaaaatatgataggattgaatcttttgttgatggtttggcaagggtggataaggatatgaaatatggtttcattgatactcggggtagggaggtgattccattggaatatgattatgcggaaaatttttcggaaggtttggctaaagttgttcgtaatgataaatgggggatgattaataagcaaggaatagaggtcgttttatgccaatatgacaagactggtgactttaatgaaggcatggctatagtttcgttaaatggaaaatatggagttgttgatgcgttgggaaaagaaatagtttcttgtaaatatgatataatagaacgcttttcggaaggagttgcatcatttaagaactatggtggagataatggctatattgacaaggagggaaatgaaataattaatttgggtaaacgaaaaatgggaggttctttttctggaggtttagctataattcattttctaggtgaggtaaaatctaaggttggttttattgatttgaaaggaaatgaggttattgctcctaagtatgattatgcacaaagcttttcagaaggtttagcagttgtggaaatgaatgggagggctggattcatagatatgaaagggaatgaggttatttctttggagtatgaaagcgcctttcgttttgaggaaggcttagcaatggttaaaaagaatggaagatatggttttattgataaatatgggaaagaggttattccattgatttatgagaatatcccttatagtttttcagatggcttagcaaaagtaaaacgagaagggaagtggggatatgttaataatcagggagaagaagttgtagcttgtctatatgacgatatagcttctttttcggaaggattagcaagggctgaaataaacgggaagtatggttttgtcgacaaatatggaaatgatacatttgataaaaaggaagatttgcagattgagatgaaagagaaagaaattcaggatttggagaatgaaaatatgtctcaaaactattacattattcaaatgggaggtaaaagtggaataagtaatggtaagaaggatgaaataatacctttaatttatgattgtataggctatagcattgaggatggacgagatgatttctttattgttcaagtcggaggaaagatgggagttgtaaataaggaacataagattattgtacctattcagtatgatgaggttcgttatgataagataatgtttcatgatttctttatggtggagttccaaaataaaaaaggattgtatgataaggatggctttaatgtagtaccttgtgaatatgattatataaatataacttcaactggatatccttatggtattttttcagttcgtcagaatgataagtttggttgtgttgttaatggtaaagaaagaattccttgtaattactatagtgtaattattacagatgattatatagtgacaagtcttcaaggagagttgaatccgcaaagagctatgtatattggtaataaatatcaggtatatgagaatggttatcagatttcagaaagaggatatgcttacaacaatgaaatgataaatagtgttgatagcgaatattctacttctaatgaagaaatgaatatcgacgatgaattgacaatgaaattgttacagagagaaaaagaaataaggtcggctgtagatgagcttgcacgtttgggagattctccatcgctttccgtaaatgaggtattaaaaattcagttgctaaaacaaactattgtacgtaactatgatgaggctcttaatatagcccaacaaacaggtgacaaagatttagttcgtgaatatgagagacgaagggataaaaccgttagagctttgcaaatgatgaaaagataaattatattatgaaaaagaattatttgaattttttatgcatagtcgttagtctgattatgttatgcgtaggctgtgatggaaataaaacttcaagcagtgacccattggaaataaaaaaagcaacggaatttgtattgcagggttgtcaatttgacggaacgggagtaaagagtttggataagattgttttatactctgataatacatctcatattgaaggagtttgggctaatggacggcattttacttggaatggtaaatggcgtattgttacagatagttatcacgataaagcgtatcgggctatcggctttgaatacagtgctgccgatgggtatgcttatattatggagaattatgatttttatttctcggaataccgcattaagcataaaggaatccctgatggcaaaatggtgaaaagggtaaattgaattaatcgtggcagggtggctatttgaaattaatagctacctttccaatattcacaaatcttgaaagtgaatgaactttaaactgttttgcataaaacataacgggagaacagaatccagatactttttcctatatctggattcaggtttatcatttacataaaaagatggacagtgccgaagattagaacccaccccatagcaacaatttgaaattactagaatcacattcagtgttaggattattttttaaataatttgtatgtatcctatttcttatttgaatctcttggattccttgttgaattgtatatatctgtttttcctctgcagataaggttatcataatattgatgaacttgtctaaatacgaatggctactttcaacaagactttcaataaatttggggacttttccagaatgagtgattaaattgcgcgttctatatatccttcgaatatgccattctactctcttctcatgttcttttaaatatttataaatacaatcactattggatagagaaagatttaaatcataaatacggtagcgtagtaaaggagatgcagataagaccttcaatagttcttgcgcaatggaaagattactttttagtacacataaggctacaactttatcaatatatgattccccttctggtaccttatttacaatttcatctactttcgcatctctcaatctttgtatatcggaggataaattggaaaagagttgtttaatatatagataattaagtactggaattaatccttttaatattagattaatttttgagtcttcattattattaataataagagtttcaagtgctatccaattctgaatcaattggttttctggtatgttattctcaatagatgttccgtgaaagtcgattccgcgattaatcctaaaaaatgagtctttcttcaaattaatctccatcaacatcttaccaagtaatttcgctgcagcttgtgggtaataatcaatgcccttttgcattgatgtcactctcttttttatatgaaaaccttcgtctttagaatccatttctttaacaaccgcttcagcactccaagataatcgttgtttgtgataataaaaagtaaacaaattatttattttattcaataatctatccacatatatctgtgcaccatacgggtcatacaattctatttgctcaacttttataagaatttcatcttgaggagttaattttagttttgaagataattcttcatcttcaacaattgatattttaaatcccttgcacatctcttcaagtggtcgaaacaatctagatatcttaagatagatgttgtatcttttcactttcaaatcaaaaagcgaataaaactcatcaatattattaacattgttaatcatattcttcttgaagaaaaaatcacatgtttttctatataaaaaatcttgtgtataccccaaatgagtgagaatagaaatatattttaatgaataatcctctatctctctctttcgtttacacgaaactattgcctcttttaatttttcttttaatagatttagatattctcttggtggcattttcatgattaataactctattccagttataaatttttcaagattagattctgttatttccaaaaaataatttttcgcatctactccaactaattcctgagcaataatatccttgttatatatacttttgaattcttcaaaaacagtttcaagagttttcaatggaaatacaccatttttcacactactagcagttcttagcaattcaagacatgatgatattgtaaacagtgttggagctttatatctatctggagaaaaatcaaacaatgcttcattcaatctctgggcaaaaaagagtaatccttcaaggtcattggtataaatccagtttttcaggtcatgcttaatcattttgtacaatttaagggttaaactactgatgtgaaattttaaacattaacaaagttacattttttctggataaaacatttatttataatctatttttcattccaatacacaactaataataatgaaactattcttcaaaatataaaagtataaactttgatttgggatttcaatattcacaaagaatagaaatgaatattaagcatatacgcatgtgcttgattattagttgtttatgcggtgctgtgtaaaatcgtaatttgcagatattcactttcatagtatattgtatgtttgtgaatattaactctctaataggtgttgataatgctgactttatttttttattggcttataatttctaagcgagttgcgtaaaacaagtgcgtaaaagagtgcgtaaattgatttgcgtaagataaatgcgtaattatgattttttagtatatggtttaatgctctgtattatagttgattaattaaggatgtgttcatttcggcagtatgcataggaggatactcctgtttgttgtgatcattgagttgaggttgttgttccataaatttttcaataactttttgtttttgatattttcttatttgccggatggcagtttgtacttttctcccaggaaatgcggttgcttatctatcgctaaatcgataaacatcttgacccttgcaaataattctctgatattggttttcaatcctgcatagacgtctacatccctggcattaaaaccgatggcggtaatcccattcttttcggcaagataaatagcccgctcattgtgaaatcgttgagaaatgatggtcagacgggtctgaccgaatacttctttagcacgcacaacagagtcaagggtacgaaaaccggcataatctaaatagatagacttttcaggaacacctttttgcataagcgctttcttcatttcttccggttcgttgtaatcttctttgcgattatctccactgataagaatataattaattttgcctgccttgtacagttcaaccgccgcatcaatgcgatagtcaaaatataaattgttatttccgcttttcagcttaggagaggtgccgagaagcagacctacattgtttgcaggaatatcactgatttcagtatagatgcaggaggctgcattcttcttgatggtccagtcgcagataaagatactgataacacaaagtatggcaattatcagtgtgatatagaatagcttttttttcattttccgaataattcactcatataatcaagggaacggctaatgtcgaaatacatttgatttccttcatagtactggcatttatcaaactctatcagatcacatttattgactagcgattgacctttcatgttttccattttgaataacatgttcagcagttggtattcgtcatttacgcagataaccttaaatgcggtttcttcgcttgtaccgtcacctgtaagcgcaatcatagtaagcaaggctgcgtatctttttgaatagtgttttatttcccggatatctttctggagcaaaccggctattccgtacatattatatagtaattggagagataccggattcttttttagtagttctttgccgatattataagcatcttcatacttttcttctttaatcaactttcggaaatcctgaaaatcatccatacttcctttgtaagctggtgtgaatgaatacccgtaatatagcatggcatgatcttgccgggtgagtaaagtatcattttcttcaaaacgttgcatgagcttttgaaactccgtattgtgattagttacgtactctttgatagccggataatccacttttaatatttcttgtgcggaacaataaacctgaaggctaagtatgcttataaataaaagagtaatgagctttttcatgacagtgtttttttagggtattaagattcacaaaaataccattctttttcaggaaaccaagcgtataggcataaaaaaaggagcaacgccttgctccaacctttgttaaccttaaatctaatactatgaaaaacacgttgcaaagatacggacttctgtgaactttgcaaattaaccaagaaaaatcttatgttatataacatagattaagaatttcccctttccgcttaacggatattcggtatttgatcgttcatataaagagtttttttatctttgcaaccaatttgaattactaatctttatatacgtatatgaaaaagaaaagactgggtcaatggatgttgttggccatcgtttgtttgagtttctcagtaggagagacctatgcacagaaacatgagttcgctaattacaagcgttatgcgacagagaatgcagcacttgcacaacctgtaaagaaggaaaaaagagtggtctttatgggcaattccattacggaaggatgggtgaggacacatcctgatttcttcaaaacaaatggatatatcggtcgtggtatcagtggccagacgtcctatcagtttttacttcgttttagggaagatgtgatcaatctttctccggcattggttgtcattaatgcaggaacaaatgatgtagccgaaaatacaggtgcttataatgaagattatacattcggaaatattgcatctatggcagaactggcgaaggcaaataaaatcaaagtgattctgacttcagtattgccggctgctgaatttccgtggagacgggagattaaagatgctcctcaaaagattcagtcattgaatgcccgcatagaagcttacgccaaagctaataaaattccgtttgtgaattattatcagccaatggtggtgggcgagaataaggccttgaatcctcaatatacgaaagatggggtacatcctacaggagaaggatatgatatcatggaagcactcattaaacaggctattgaaaaagcgctttaattatagatagagtgtagataaaaaatgccctttgataagatttcaaggggtatttttgtaggattggaagatgctaagatggggtatgggcataaaaaaaggagcaacgccttgctccaacctttgttaaccttaaatctaatactatgaaaaacacagtgcaaagatacgggcttttgcgaaatctgcaaattatttctcttaaataggtgtttttataacactaattagcaaaagctcgggtttcttatagatttattgatatttataagccgtttatccccacttttctttcatcaaatcttccagtttcagcagctcattccgatattgggcagcttcgataaattccagttttttggcggcctcctgcattaatttgcgggtacgctctatgctcttttccatttgagctttgctcatatattgtacgattgggtcggctgcgatattaggtgaagaaggttccacataagcgtgtttttctttcagcaactcatcggcttcggaacctggactgccaaatacagacaagtttctcgcctttttgatttgttgtggggtgatgccgttcgcttcattataagcgagctgtttctcgcgtcgacggtttgtttcatcgatcgtaagccgcatactgtctgttattttatctgcatacatgattacttttccgtttacattacgggcagcacgtcctgcagtctgggtcaatgagcgatgcgaacggaggaagccttccttatcggcatcgagaatagcgacaagggatacttccggaaggtcaagaccttcgcgaagcagattgacaccgataagtacgtcataaacgccttgtctcaagtcatccatgatcttcacacgctctaatgtatccacatcgctatggatatagttacatctcacattattgttgagaaggtattctgtcagctcttccgccatacgtttcgtaagtgtcgttacaagtacccgttcttctttttcgatacgcagctgaatttcttccatcaggtcgtcaatttgattgagactcgggcgtacttcaataacaggatcaagcagaccggtagggcggatcacttgttctacaacgatcccttccgattgtatcagctcatattctgccggggtagcactgacataaatcacttgttttgtcatctcctcaaattcttcaaatttcagagggcggttgtccattgcggcaggcagtcggaacccatattctaccagattgattttacgggcacggtcgcctccatacatggcgcgaacctgcggcacgcttacatgactttcgtcaataaccagcaaaaagtcatccgggaagaaatcgagaaggcaataaggacgggtgccggcagcgcgaccatcgaaataacgggaataattctcaatgccggaacagtgccctaattcccggatcatttccatgtcatacgtaactcgctcgtacaatcgtttagcttcatattctttgccgatagattcgaagaacgctacttgtttggttaagtcatcctctatttcgtggatggcacgaagagtagcttccttggtggtcataaataaattggcgggatagatcttataagcttcgaaaggagcggtagtcacaccagtaatcgggtccacttcttctataccatcaatctcgtctccccagaaagtgacacgaagcagagtgtctgagtacgcaaggaaaatgtcgaccgtgtctcctttgacgcggaagttgccacgattcaaatcgatatcattacggacatacaggctgtccacaagacgacgcagaaaaacattacggtcaagcatccgcccccgttcaatttcgattacatttttatagaaatccgacgggtttcccataccgtaaatacaggagactgaggaaacgactaccacatctttccggcctgaaagcagggaggaggtagcggcgagacgtaacttgtcaatctcgtcattgatggcgagatccttttctatataggtatctgaatttggcagataggcttccggctgatagtagtcgtaatatgaaacgtaatattctacggcgttattggggaaaaatcccttgaactcgctgtatagctgcgcagccaatgtcttgttgtggctcaagatcaacgtaggcttgttgatgttggcgatcacattggcgatggtgaacgtttttcccgatccggtaacccccaataaagtctgtgcgggaactccttgaagtaccccctcagtaagctgggcgatcgcttctggttgatccccggtaggtttgtaagctgatgttagttcaaaattcatagttaaatcctaaaaagtggagcaatattcggcaaaataattgagataacaaatcatttttccaaataaatcctttactttgcaacatattaatatcatgaaacagattcatacaactaataataccaagagaacatgatttggaatgagaccattgagtgtatggaccgcgaaagtcttcgcaagattcaaagcatacgactcaagaaaattgtggattacgtttatcacaacacgcctttttaccggaagaaaatgcaggaaatgggtatcacccccgatgatatcaatacgattgatgatatcgtgaaactgccgtttaccacgaaacatgatttaagagataattatcctttcggactttgtgccgtgccgatgagccagatcgtgcgtattcatgcctcttccggaacgaccggaaagccgacggtagtgggatatacccgcaaagacctttcttcgtgggcagaatgtatatcgcgtgcttttactgcttatggagcaggacgctcagatatatttcaggtttcctatggttacggactttttacgggtggcctgggagcacacgccggagctgagaatattggtgcttctgtgattccgatgtccagtggtaatacagaaaagcagattacattgatgcatgattttggatcaacggttctttgctgtactccttcgtatgcactttatctggcggatgccattaaagattccggctatccgcgggaggaattccaactgaaagtgggagccttgggtgcggagccctggacggagaatatgcgtcatgaaatcgaagaaaaactcggtattaaagcatatgatatctacggactgagtgaaattgccggaccgggtgtaggttacgaatgtgaatgtcagcatggtacgcacttgaatgaggatcattatttcccggaaattattgatccgaatacattgcagtcggtcgaacccggacagacgggcgagctggtatttacgcacctgacgaaggaaggaatgccattgcttcgttatcgtacgcgtgacttgacggccttgcattatgataaatgctcctgcgggcgtacattggttcgtatggaccgtatcctgggacgtagtgacgatatgctgattatccgtggtgtcaatgtattcccgactcagatcgagtccgtcattcttgagatggaagaattcgaaccacattatttgttgatagtggggcgtgaaaacaataccgatacgatggaacttcaggtagaagtgcgcccggatttctattcggatgagattaaccgtatgctagcgttgaagaagaaactggcaagccgtctccaaagcgtacttggactgggagtcaatgtgaaactggtagaaccgcgtagcattgaacgcagcgtgggcaaagctaaacgagtgattgataacagaaaaatttaaaataggtaataagtaataagtattaggtattatcgtagctgcaacatggaatccgtgtggctattacttattacttattacttaatacctaatacttaaaactttacgataatggtagcaaaacaactttctatctttttggaaaacaagtccggccgtttgacggaagtgactgaagtgctggcaaaagagaacatcaatctttctgccttgtgcatcgctgaaaatgctgattttggcattttgcgtggaattgtatccgatccggataaagcatataaagcattgaaagataatcattttgccgtgaatataacagatgtggtcggcattagctgtccgaatgtgccgggagctctggcaaaagtgctgggattcttgtcggcagaaggggtctttattgagtatatgtattcgtttgccaataataacgtggcaaacgttgtgattcgtcctagtaatatggataaatgtattgaagtactgaaagaaaagaaagtcgacctgttggcggcaagtgatttgtacaagctgtaaccggacggcggaccataagcgaacggtgaacgaagaacgatagcgctggtataccaatgacatatagcgcgcttgttgatcgttcaccgtttattattgactgtttatagcttcctgttcgacgtcgttttttctcttttcgtcgatgtttaacgccttttatgtattaaaaaacatagattaattggttaattccccgcgaataagtaactttgcgcaatattttttaaaaggatgaagaaaaatatcattataactttgctcgcagcagcctctctgacatcgtgtggagagtacaataagttgctgaaaagtaccgattacgaatacaagtacgaggccgccaaaaactattttgctaaagggcagtataaccgctcagctaccttgctgaacgaattgattacaatccttaagggaaccgataaagcggaggagtctctgtatatgttgggtatgagttactataatcagaaagattatcagacagctgcccagacgtttatcacctatttcaacacttatccccgtggcactttcactgaactggcacgtttccatgcaggtaaatccctgttcctggatactccggaaccacgtttggatcaatcaagcacttatcaggctatccagcaactgcagatgtttatggaatatttcccgaacagtaccaagaagcaggaagcacaagatatgatttttgctttgcaggataaactggtgttgaaagaactctattctgcaaagttgtattataatctgggtaactatctgggtaataactatgaatcctgtgtaattacagctcagaatgctctgaaagattatccttatacagattatcgcgaagaactttccatattgattctgcgtgccagacatgaaatggctatttatagtgtagaagacaagaagatggatcgttaccgtgaaacgatagatgaatattatgctttcaagaatgagtttccggaaagtaaatacctgaaagaggctgaaaaaatattcaatgaatcacagaaagtaattaaagactaaatttaaatagatttatggactacaaaaaaacgaacgctcccgctacgacggtaacccgtgacatgatggaactctgtgctgacacagggaatgtttatgaaactgttgccattattggtaagcgtgctaaccagattagtgtggaaattaaaaacgatctttctaagaaattagcagagtttgcttcttacaacgataatttggaagaagtattcgagaatagagaacagatcgaaatttctcgttattatgagaaattgccgaaacctgacttgattgctacacaggaatacatcgaagggaaaatttattatagaaatccggctaaggagaaagaaaaacttcagtaatttattttctaacgaaagaattgatagtcaagtagtaagcgggaagcattttcctattccttattgcttggctattattgtttaacttaactactatagaatacttatgattcaacgaattcaaagtttttacttattgattgtaacagggttgctgattacagcaatgtgtttaccgatgggatattttattgacactacaggagaacatccttttaaagcactggggatagacgtgaatggaattttccagtctacttgggggatatttggtattctgatgctgagcgctctggtagcttttgcgactatttttctgtataagaaccgaatgttgcagattcgtatgtcaatcttcaatagcttgttgctggtgggctattatattgccttcattgctttttattttgcattgaagagcgatgccaatctgttccgtattggttgggcgctttgcttaccattggtgtctatcgttctgaatgtgctggctattcgtgctatcggacgtgacgaggtgatggtaaaggctgcagacagacttcgataagaatgcgggaagctctcgcattgggagttcctgatagaataaaacaggcgcgaatttcgcagactcacggaaatataaaccgtaggttcgagcgagattcgcgcctgatctttttgggtactgcttcttatttctttaaatcgaatagataagtaagcttcactgtaattgtgccatgagccgcacgggagaaatagtctttcttcgttgtgctgtaaaagtctgacagagcaaaataatagcgtccttcgagcagaaaactaccggctttctttgttctgaattctattccgccgcctccggctataccataatcgaatttgttttggattttatctccgtaaacagctttttgagtgtctgtcagggcattcatgtctatattctccatgctttcagattcaccgatcagaaggccgatctgaggacctgcattgataaagaactgcagtcctttttcattgccgaaagccaagtgggcgaggaagggaatatcgagataggtcatctttcgggtgtatttgcgggtaggatcttctacgggttctccattctcccccggtacttcaaataattcatcccagccacgttgggagatatttaactctacttgcgcaccacagatcatggcaaaatacttttcggaaatgtagcgtgccgtcaaacctccggtaatacccatcaatgagttctgtttgattttaggagtgaatgaagcactgtttaagttgacacctccattaaatccgacagaaaagttctggcgtggttcgccgatctgtgcggtggcaggaagcgcaagtcccatcatcagggaagcggcaatcagaagtgattttatctttgtcattttcgtcttattcgaagtcaagttttactaattcaaaattcttcgtgaaatggataaagaatactttcttattaatgaatcctccccagttgttgacacgttcgaatttgaagcctgtctgtatcggagtcaggttcattttcggtaaattgttttccagttccgagccatagcgtgacaagcctttcaggaagaagaagcctgtgtcgaaaccaagcattccgtagcttgggaatttactcaccaagtccttgctataccatttgtgataattgttggtgaactgtatggcagccggaaacaatgtatttgtgtagaacgatgaatagaaataggtatccagttcaaagaaactttccaggtgatcccgggtatatgtctgccattcgggataaccgaacagatgaatattctgctccggagtatctctgaccagtagaatcagttgaggaagaatcttgattaacatgacatttttgccggaagtcggaatgaaaatattgtctttgtcagagcggagagcttccttcagcatatccttggttgcgttttcattgacggttttcattgacattcccttgctcttcagctcttgtttcatgccgctgataaactcggctttttctttatcttcgctggttggttcaataaagatgacatgggcattggggaattgacgggtaaagtgttcgtatacttccgaatataaataggattgcggggtattaatctggtagatggcaggattattaaatacttcttcccctttcgaagagaaaggaatcaccagtcgtatatcattcttttctgcaaaagtagataaaggtttgatctgttgctggtgcatcggaccgaaaatgacattcatgttcttcatctcatttttcgccagaatagtatttaatgtagaaacatcttttccacagtcatatacatacagatcaatagaagtacccgtacgtttcagactgtctaccgccatcaggaaaccttcgtagtattccaccatacgtttgtcttcctggaaaggcaatagcagggccgctttgatagtggagattgcctgaggggcttctttgctcttgcggaaaagttcattgttactgggggggatagcgtacggatcctctttgggagtcgtcggttgcatggtggttgcactgggataggggatacagaggtattgtccctttttcattccctttttcagttcgggattggctgcaatcaattcctgttcgctgattccatattcgcggcttacactgaatacggtttctttgcgttttaccttatgcatatctttgcatctggattgtacaggtccctgtatagcgggtttttcagccggtgtttgcgtagcttccgtttcctgctcttgttccaacggaatgaggataacctgaccgatacggaagttttcggcgcttaatcccggattggcttcacaaatggctttggcagatacattataaatggtagtcagtttgtataaagtttctccggcttgaatcgtatggaatgtttcccctttctggctttcttttcctttagggatttttatggcttgcccggcataaattttctcatcacatccgggattcagacgtatgatgtcgtttgttgtgacattatacatcttggcaatggagtataaactctgtcctttttcgatggtatgcaagaaataagattggttctcttgtgcataactaatagcgtatgaggcgcttataaaaagcaaaaataagaatattcggcttatcggtttcatcaatttataactattggttcttgaaatcaaggaacaaaggtacgaataatgccctatatcttcataagatttgagttaagaaaataatattgtgcttttttaggagcatatttcagtcggaaacattaattttgtaccgtttatgaaggatatgaatatgcaagaaacagaatatattaatgtgtatggtgcccgtgtgcacaatttgaaagatattgatgctgaaattccccgtaacagtttgacagtgattaccggattgagtggtagtggtaaatcttccttggctttcgatacgatatttgccgagggacagcgccgctatatcgagactttttcggcctatgcccgcaactttttggggaatctggaacgtccggatgtcgataaaataacagggctgagtccggttatctctatcgaacagaagactacgaataaaaatccccgttctaccgtgggaacaacgacggaaatatacgattatcttcgtctgctctatgcccgtgcaggtattgcttattcgtacctgtcaggagaggagatggtgaaatatacggaagaacagattctggatttaattctgaaagattataaaggaaagaaaatatacttgctcgcacccttggttcgttcgcgtaagggacattacaaagaacttttcgagcaggtacgaaagaaaggatatctctatgtacggatagacggcgaactgcgtgaagtgacgcacggcatgaaactcgaccgttacaagaatcatgatattgaggtagtcattgataaactgatagtagctgagaaagatgataaacggctgaaacagagcgtggcaactgctatgcgccaaggtgatggtttattgatgattctggatgcgcagacagaaagtgtccgtcattacagtaaacgcctgatgtgtccggttaccggactgtcttatcgggaaccggctcctcataacttctcgttcaactctccgcagggagcgtgcccgaaatgtaaaggattaggcgtggtcaatcagattgatgtcgataaagtgattcccgaccgtgaactttccatctatgaaggagcgatagcacctttgggaaaatacaagaatgccatgattttctggcagatcggtgctttgctggagaagtatgaagctactttaaaaactccggtgaaggaattgtcggatgatgcggttgaagaaatattatatggttcggatgaccggatcaagatcaagagttcgctgataggaacttcttctgattactttgtaacctatgaaggagtcgtaaaatatatccagatgcttcaggaaaaggatgcttctgctaccgcgcagaagtgggcggagcagtttgcccgtaccactgtttgtccggaatgtaaaggtgcccggttgaataaagaagcattgcacttccgtattcatgacaagaacatcaatgacttggccaatatggacatcaatgagctatatgactggttgatgaacgtagatcaatttctgtccgataaacaaaagaaaatcgcagccgagattctgaaagaaattcgtacgcgtttgaaattcttgttggatgtaggattggattatttggcattgaaccgtagctcggtcagcctgtccggtggtgaaagtcagcgtattcgtctggctacacagatcggctcgcaattggtgaatgtgctttatattctggatgaaccgagtatcgggttgcaccagcgtgacaatctgcgtttgatccgctcgttgaaagagcttcgtgatatgggaaactcggttatcgttgttgaacacgataaagatatgatgctggctgccgattatgtgattgatatggggcctaaagccggtcgtctgggtggggaggtagtcttctcgggaaccccgtcagaaatgcttcaaaccgaaacgatgacttcgcagtatctgaacggagagatgaaaatagaagtacccgccaagcgaagaaaaggaaatggaaaatctatctggctgaaaggagcgaagggaaataatctgaaaaatgtagatgttgaatttccattagggaagttgatttgtgtgaccggagtatccggaagtggtaaatcgacgttgattaatgagactttgcagccgattctttcacagaaattctatcgttctttgcaagatcctctggaatacgattctattgaaggactggaaaacatagataaggtagtggacgtggatcaatctccgattggtcgtaccccccgttccaatccggccacttatacaggtgtattttccgatatccgtaacttgttcgtaagccttccggaagctaagattcgcggttacaagcccggacgcttctcttttaatgtatcgggcggtcgttgtgaagcctgtaccggaaatggatacaagacaattgaaatgaacttcttgccggatgtgtatgtgccttgtgaggtttgccacggcaagcggtataatcgcgaaacgcttgaagtacgtttcaagggaaagtctattgctgatgtgcttgatatgactataaaccgtgctgtcgaattctttgagaatgtgccgcagattctgaataagataaaagtcttgcaggatgtcggtttgggctatattaaattagggcagtcatctactaccctttccggtggagagagccagcgtgtgaaactagcaacagaattgtccaagcgagataccggtaaaacactttacattctcgatgaaccgactaccggacttcactttgaggatatccgtgtattgatgggggtacttaataagctggtggacaaaggtaataccgtcattgtaatcgaacataacctggacgttatcaagatggcggattatatcatagacatgggacctgaaggtggtaagggcgggggagtactccttagctacggaacaccggaagaggttgcgaagagccagaaaggttatactcctaagtttcttcgcgaggaattaggactttaatattgaagtataagtgtcggcttactaaaaagaaacaacaagatgaaaatcaataaaacgaatgcggcgcgtctgctggataaagctaaaatagcttatgaactgattccttatgaagttgacgaaaacgatctgagtgccattcatgtagctgccagcttaggcgagaatatagaacaggtatttaagacactggttcttcacggtgacaaaagcggttattttgtttgcgtcattccgggtgagcacgaagtcgatctgaagctggcagcaaaggcttccggcaataaaaagtgtgatctgataccggtgaaagaacttcttccgctgacgggatatatccggggcggctgttcgcctattggcatgaagaaacattttcctacttatattcatgaaacctgccggcaatttccgtatatttatgtaagtgccggtgtacgggggctgcagataaagcttgcgccgggtgatttaatccgcgaatcgagggcagaaatttgccgtttatttgaggaataaatccaaaaaagtatatatttgcagaatatatgtcattagaaaaattatcaatcattaattaataaatttatatctatgtttgacaaacaccctaaaggactgatagcagccgctttagccaatctaggtgaacgctttggcttctatacaatgatggcgatcctcgtgcttttcttgcaagctaagtttggaatgaatggaaaagaagcgggatttatttattcaactttctatttttccatttacattcttgctttggttggaggtattatcgccgataagacacgaaactacaaaggaactattttcacgggaattgtgctgatggcagtgggatacttgttgttggctattccatccaagactccggtagacaataagaccttttatctggtcattacttgcgccagcttgtttgtgattgcatttggtaatggattatttaaaggaaatctgcaagctctggtagggcagatgtacgataatcctcaatatgccagcatgcgtgactccggtttctccttgttttatatgttcattaatatcggtgcaatctttgctccgtttgcagcagtaggtgtacgtaactggtggttgtctactttcggttataattacgatgctgatcttcctgcattatgtcacggtcatttggctggtactttgtcgcccgaagctactgaaacttatcatacgttggtagagaaagcttccaacgctccggtacaggattatacagcttttgcatccgattacctgaacgtctttactacaggtttccattatgcatttggagtagctatcattgctatggtcatttctttgactatctatttgctgaataagagaaacttccccgatcccagcaagaaagccgttgcgtcttcagcatcttcggctactgtagaaatgagtattcaggaagtgaaacaacgtatgtatgccctgttcgcagtgttcggagttgttatcttcttctggttctctttccatcagaatggtttgactttgacatactttgcaaaggaatacactgaccttaacttgtttggtatgcctatttccgctgagttgttccagtcgttgaatccgttctttgttgttttcctgactcctgtgattatggcaatctttgccagccagcgcagacgtggaaaagagccttctactcctaagaagattgcaattggtatgggtattgccgcattggcctttatcgtaatggctgtcggttcttattttgccaatctgcctttgcacaaggacattatcgctgtaggaacttcaccggtgaaagtgactccgttcttgttgatgctgacttatctgattttgacggtagctgaattgtatatttctccgttgggaatttcatttgtgtctaaagtagctcctccgaaataccagggtattatgcagggaggctggttaggtgcgactgcacttggcaatcagctgttggtgatcggtgctattttgtatgaatccattcctatctggatgacatggacagtatttgtggtagcttgtactatttcaatgtttaccatgatcttcatgctgaaatggctggaacgcgtagcgaaataagcccgcttggtaataaataaacgaatgccccggaacattgattgaataacaatccgttccggggcattttgtatatggttaccttacttttcagatatccagtcccatgatataatcattcatatagtacccgttgccaatcggaaaatccccttcccgcaattttctcatacccatccgttcatagaacagcaaagccttgttgttacggttcacgttaagctccattaagcaaggttccggatgcacctccttgatatatctgacagcctctctgaataaaaaactaccgcagtgtgcgccttgaaaatgggggaggacatagattttctgcagatggaatacattctcttcctgttgctgtacggagacatagccacagggctcatccccttcatacgcaataaaataaacatgaccttcttcttccatttgtttccggatattttcgggagagtacatccagtccatcatatagtccagttgttcgggagataagatctcttggtaagtggcgggaaatacttcaccggccatttggttgatcagaccgcaatcatctatccctgcttttcgaatagtaaacatacgtattttcttttttgtggttttatgagctgcaaatatagctattatttctttttataataaggagaaaacttcttaatgaattaattattattaaattatagtactttgcaatgcaaggtactaaggtaatgcatatatttgtcctgtcaaaaagaaaaataacaatgaatgtagacaatgtaaaatctcagatgagaaaaggcatgttagagtattgcatcatgcttttactgcacaaagagccggcttatgcttctgatattattcagaagttgaaagaggcgcagctgattgtggtggaaggtaccttatatccattgctgacacgtttgaagaatgacgatttgttgagttatgaatgggtagaatccacgcagggacctcctcgcaagtattataagctcacagaaaaaggagaggcctttttaggcgagcttgagatatcctggaaggaactgaacgaaaccgtgaatcatattgctagtagataattcgataaagaagaaataataatgaaaaaaacattgactgtaaatttgggaggaactgtctatcatatagatgatgatgcctaccgcttgctggacgactatctggccaacctgaaacatttttttcgcaaacaggagggggcggaagagattgtgaatgatatcgagattcgtattgccgagctgtttgccgagaaagtgtccgcagggaagcaagtcattaccattgccgatgtggaagaaataattgcccgggtaggcaagccggaagattttggtgtatctgatgacgaatccgaaccgcataagaaggaacagacagcttcttccggtcagggatatacacggaccactacagcccgtcgcctgttccgtgatccggataataagttgcttggaggagtagcttccggactggctgcttattttgactgggatatcacgctggtgcgtatcctgatgatcgtattattgtttgttccctattgcccgatgattatcctttatattataggatggattatcattcccgaagcacgtacggcagctgagaaactgagtatgcgtggcgaagcggtaactatagaaaatataggcaaaacggtgacggacggatttgaacgggttgccgacggggtcaataactttgtgaactcggacaaaccgcgtacctttctgcagaaagtaggagatgtatttgtgacgatcgccgctatcattcttaagatattcctggtagctcttgtcatcatttgctgtccggtattgttcgtgctcgctgtggtgatagtagctcttgtgtttgcggtgattgctgcgcttgttggtggcggagctctgctttatgaaatgcttccggctattgactggacgcccatagctaccatatctcctgtgatgacattgcttggcaccatttcaggaattgcactcattgccattccattaggagcttttctgtacaccataatgcgtcagttgttccattggtcaccgatggggaccggcttgaaatggtcactgtttatcctatgggtattgggactggtcatcgtgattatcaatttgtcagctctcggatggcagttgccgttgtatggactgcattgcttttaatataagatcgttctattaaaaaagaataatatttattctttttctgagaaatgtgccccgatagtgtgtccggggtacattttttgtttgtccctctttgtaaatcgagatttttaattaagtttgtgaggacttattcaatagataaagaaaatgggtgaacatatatgtttcaggagaaacgaacgtttggctaccgtcaatccttattggagaggaaatccgatggtacgcggacgtttttttaacaggcagcaccgtttccgccccggtatgggaagtgtgttgaaatggcggttgtcccccaatcctcagcggaaagaaaagaaaacggtgaagtgggacccgaaagtctgttaccttcgttcgctggatgctgtggtgggagattctttaatatggctgggacataattccttcttccttcagttggcaggcaaaagaatcatgttcgatccggttttcggaaacatcccttttgtgaaaagacagagtgagtttcctgccaatcccgacatttttacagaaattgattacctgcttatcagccatgaccattttgatcatttggacaagcaaagtatcacccgtttgctgaataataatccgcagatgaaactgttttgcggtttgggaaccggagaactgataaagagctggtttccggaaatgagagtgatcgaggccggctggtatcagcaactggaagatgaagggctgaaaataactttcttgccggcacagcattggagcaaacgttccgtacgtgatggagggcagcgattgtggggagctttcatgctgcaggggaatggtgtttctctctattatagcggagacacagggtattctacccattttagggaaatcccggatctgttcggagctccggactatgccttgttgggtattggtgcatataaaccccgttggttcatgcgtcccaatcatatttccccttatgaatcactgactgcctccgaagagatgcatgcaggaataaccattccgatgcactacggtacatttgatttgtctgatgaacccttgcatgatccgcctaaagtatttgcggcagaagcaaagaaaagaaagattcgtgtggaaatcccttatctgggagaaatcgtaaaactgagtaaaagaaagtaattataaaataaactgagagatgaagaagttagaagtaaaagacctgaaagaaaatttctttgaggcgattggcaaagaatggatgttggttactgccggcaccaaagagaaattcaatacaatgactgccagttggggtggtattggctggctttggaatgagcccgttgcttttgtttttgtccgccccgaacgatatacgtatgagttcatcgagaaaagtgattatctgacactttcttttttgggcgaagcaaataagaagattcatgcggtctgtggctcaaagtccggtcgtgatacggataaggtgaaagcaaccggattgaagccggtcttcacagaacaggggaatgtgcttttcgaacaagcccgtctaagtttggaatgcaagaagctctatacagatactattaaacccgaatgtttcttggataaagagtccttggaaaaatggtatgacgatgctcatggaggttttcataaaatgtatatagtagaaatcgaaaatatttgggagggagattaattctccctttttttattttttatcggtaaagctttgataagtgatataaatattatacatttgccctaaactaaactattgtaacacaactaaaactaagcgttatgaaaacaaaaatgttctttcttgcaggtatctgtgctgcactcgcagcttgtagtagtgattcggatgatgtgtcttcttctccatccaatgctccggcgatattagaggttgtttcctataagtttgtgcaggaggaaacggatgtagtagagcgggttgaatatcctgtagtagtcttgcaacataaagtaaatgataaagatgaacctcttccaatgatatatgcatgggatgtggaagaggaagagaactctttatttgtattgactgaaggttctttgcctgttaatgctgaaaatttggcggatttgaagattcctgttcctttcattgatgctggaggtaagctttttatagacggaacgggtgcgaagactccgttgatttttggagaaacattaaaagtaaagaatggatcacgttctattggaaatgtaaagtatgagatacctccctattcaacttatgagttaacaaaacaagaatgtggatatcgatgtaccttaactttttatttggtactgaaggccgtaaataaaggggaagaataccatttaaaaggcagatggactggagaacaattaagggagcaaaaaatgggattaattgatttatcagacgaaaaaggtgctgaaaaaactgttttaatggaggctccgattgagctatttgaaaaggattatgaaacaggtctagattgaatcatagaccttatctaagtatatagtagcaatcgaaaatatatatcatgagtaaagtctagcggattttagatgtaatgcagaaggctctgaactcaatttgatttgagaacagagccttcattatttgtcttatatcaaagatttattttgcaggagccttcagccacttatccagccactcaaagaaagtgcgttgccacaagacgccattctgtggtttcagtacccagtggttttcatccggataaatcagcaactctgcaggtacaccacgcattacagcggcatcaaatgcagccatagcctgattagccaaaatacggaaatctttttctccatgaatacagagaatcggagtatcccatttttccacgaagaggtgaggggagttggcgaaagtacgttgtgctatcggattctgtttttcccagtacgcgccgcccatatcccagttggcaaaccatttctcttctgtttccagatactgcatttccatattgaagattccgtcatgagcgataaatgccttgaaacgtttgtcgtgatgaccggctaaccaatatacggagaatcctccgaaactagcgcccacacatcccagacgatctttatctacatacgattcttttgccatctcgtcgatagcagtgaaatagtctttcatacactggccaccataatcaccactgatctgttcgttccattccactccgaatcccggcaatccgcgacggttcggggctacaatgatatagtcgttggcagccataatctggaagttccagcgataagaccagaactggcttaccggactttgaggaccaccttcacagaacagcaatgtcggatatttcttgttcggatcgaactggggaggatagatcacccatgtcaacatatccttgccatccgtcgttttcatccagcgaccttctaccttgcccatttccagctgatcataaatctccttgttctcctgtgtcagttgagtggcagaaccatccaatgctaccgcatagatctcatcacccatactcattgagtggcgtttagcaatcagtttgtcaccgaagagtgctaccccttcataatcatacatacccgaagtaatcgcctttacagaatcattcgtcaggtcaagagaataaatctgagtttctccgtgccatacacctgtaaaatagatggtcttggcatcgttgccccagacaaacgcatccacattagactcaaatgctttgctgacaaaacgcttctctccggtttccagattcatgataaacaaacggttcagatcagcttcgtatccatcgcgctccatgctttgccatgcaatgtacttgccatccggagagtattgcggattggtgtcataccccttgttttcttcggtgatattatccgttttctttgtattcagatcatacacataaatatccgaattggtagaaacagcatattccagccccgttttcttgcgacaggtataagccactttgtccgaagtcgtattccacgccagctgctcaatgccgccccaaggtttcatcggactttcgtatggttctccttccagtatatccacgatattggaaataccgttaccgtcaaagtctgccacgaaaggatgcggagcagttgtcacccattcatcccagtgcttatacatcaggtcggtgacaataatacctgtagctttcggcagatccggatatttatcggcagtgctttctttggttttcacttgcgagatgaacagcagtttcttgccgtccggtgagatagaataaccctcgatgtcaccgtcgtagttggtcagttgtttacggccgctaccgtccggattcatttcgtatagttggctgcttccgttgtcgttgctcaggaaagccagcttcgttcctccttttatccaggtcacctcattctcctgataaggagtgcgggtgatttgccggttatcgctgccgtccgcgttcatgacgaaaacttcgcgattactcttgttctccggtacactgtagtatgctaccgtatacgcaattttctttccgtcgggcgataccgccagtcctccgatacgtcccattgcccaaagggcttcaggcgtcatacgcttcccttcgatcttaatatcggatttttcgataagcacctgatccgttttgcccgcgtcttttgttccgccgcaggcagctaacaacattgctgccgacatcataaatagatttgcttgtctcatattttataaaaatgtttattttcttgcgaagataatgaaaaaaggatttaaatctgctttttctgccagtttcctttcttcatataccagtagcagaagaggaggataaagattccatacacactttctgttgtccaggcaaacgcaatgtccattttaaggtaaagaataaaataagtagcgtaagctacataaattgtcagtacacaaagttccatggccagtgccgtgcgtgtgttacctgttcccgataccgactggaaatacacattggctggtaccagcactacataggctgcgcataacacccataaagaagggatggacgcatccctcaaatcgggcatatccgtgtatatgcgcagaatcaggtcgggaaacagacagaagaatatcaatatcggcagtacgaacacatatccgatacggatgtgctgattgatggttccccgtacacaatctttttcgcccgcaccgataaggttgctgaccagagatccgcaggttgcagcaaaagccatggcgatcataaacgggatacccgacacattccggataatgttcgcgatagccaatgaccgttctcccaggtgttccacgaacaggaagaacataaaccaggtagataaagaaacgaagttctgaatcattgtccacacggagacattgagaatccgcttcaatgtccggctttggaatttcggcaggatattcagtgcatacttcttgcagtcgatccgcttccaggtatagatgataaagaaaatcaccgataccagctcggcgagggatgaaccgatggctgcaccggcaatgcccagttgtgggaaaccgaacttaccgaaaatcaggatatagttgaataccacgttagaaagcaccatcacgatggagttcagcgtcagcgtcttggtctgtgtcgtaccgacaaagaaggcacggaacatcactccgacaaatgagaaaaagaacccgtacacccgccaatgaatataactttccgcagcatcataaatgtgaggggacgaaatgatattctttaaaataaatggcgagaatacgatggaaagtgtaaacagaatcgcagcaaccactaccaggaaataaatcccctgatagaaaatcggtccgatttccttgtagtttccttccccgttgcgacgggcgatcaatatctgtgctcctacgctgaatccgaatgccatcatgaaaatagccaggtagtaaaccccggcgatggcggatgcccctaattcaatttccccgacacgtccaagaaaggccgtgtccgtcatgccgatcagctgctccataatcaggctgatcagaatagggtaggcgatcgtccagatttgtttataagtatattttgtcttcatattaagtttgttttttagagaaagaaagccggacaaacccctttcggttgcccggctttctcagaatatatcttcggataatttcttatcgcttattctgtttttgctgctgtaactgttcctgttgcttttgcatagcttccaggcgtgcagcaaatccggtctttttcatttgtttcgggtcttttttcttagcttccagaatagccagtaattttgtttcgtctgtagttttacgcaacaaaatcatggttcctacactaatcagtgttgacacgaaataataatagttcaatcccgaaggatagtcgttcagtacgaacaggaacataatcggcatcagatacatcatccatttcatcgcagccatttgcggttgtgctcctgtatcctgcatcgtcattgtatactttgtgttcaggatgttggttaccgtcatcagcaagcagaacaagctgagatggttgcccaggaacgggatatggaacgggaatgtgatgaacgcgtcgtaagtggacaagtcgtccgcccacaagaagctctgctgacgtaactcgatagcgctcggtacgaacatgaacaatgccatcaagatcgggaactgcaataacattggcagacaaccgcccatcgggctcacgccatactggctgtaaaggctcatcacctcctgctgtttcttcatcgcatcttcctgcttcggatacttcttgttgatctcgtcgattttcggtttcaatacacgcatcttggcagaagacatgtatgttttccaggtagcagggtaaactaccaccttcaccatgattgtcagaatcaacagtacgatacccatgctcaagccccagcccgacagccagtcgaatacgttgatcgtgataaactggttgatccagcggattaacggccagcccagatataccagtctgttaagttcccatttctctgtacgtcctttgtccagtgccttcaaggtcttgaagtggttcgggccaaagtagaagtacatttctgtcggttgttttccgctcggatcgaagaaggtactcatttctgcagaataatccttgatatatccgcttccttgttgttccattcttgacttcacagaaaccttgttgaagtcctggtctgcgatgaatacagaagagaagaactggtttttgaatgctacccagtctatcgctgtattgcccagatccttttcgtcatccttggcagccgacagattatctacattgtcaccttttaccttataagtcagctctgagaggcggttttcgtaagtgaatcccttttccagctggcgtgcacgctgtgtccagtcgatgtctacatactccgtactggccagtttgccttccatgcctgttgctttgatttcaaagttcatcaggtagctgttcggtttcagcgtatagataaaatcgatgtagctggcgttgtccgcagccagacgcatagttacgctgctgtctgtcttattgacagcttcgaagtaatagtcctttgtctggatggctccttgcttgttgtagaagttgaaactcatggtagcatcatcaccgtcgaacagtacgacagggtttgtcttgtcctgtcctttgtattctttcagcatagccgaatatacccgtccgcctttcgtagtgaaagtgatttccgctacgctgttctggatgcttactttggaatcagttccatgcatcgcgttgaaaaacagggcagaagaatctgctgccgccgctgcacctttgttttcattggcgagtgcggcttctgtttttgctttcagcgcttcctgctgctgttgcaccacggcaatagaatcgtagtatttcttctgcgcagctatctgctcctcgcttggacggctcagataactgaatcctaccaataatatacctattaaaacgagacctgtaatggtgtttttatccattcctattaattatgaattataaatttttgaataataaattgtcaattgtcaactgtcaattgtcaattcttctcgttctcgatggctgccttcacgaaagccacaaacaacggatgcgggttcaataccgtactgctgtattccggatggaactgagtgccgataaaccacttcaatgccgggatctcaacgatttccaccagatccgattcggggttgatacccacgcatttcataccggcagcttcgtattgagccttatagtcattattgaactcatagcgatggcggtgacgttcctgaatatgttcttcaccataagcaaggtatgctttcgatcctttctgaagcacacattcgtaagcgcccagacgcatcgtacctcccatattggtgatcgctttctgttcctccatgatgtcgatcacgttgtgcggagtcttttcatccatttcgcgtgagtcggcatcggcatatcccaatacgttgcgggcaaattcgatagcgatacattgcatacccagacagataccgaaggtcggtatatcatgtgtacgtgtatatttgatggcaacgaacttaccgtcgataccacgctgaccgaatcccggaccgatcatcacgcctgccatgcctttcaaggcttcggctacgttctcatctgtcagtttttcgctgttcacaaagtgaacctccactttgcggtcgttgtaagtacctgcctgtgacaatgcttcacggattgacttgtaagcatcctgcaagtcatatttacctaccaatgcgatgttgatgggttctttcgtttcagcagcatggcggcgttccaggaatttacgccatggacctagtcccggagtttctcctacgggcagccccatcttttcaaggattgtgctgtccagtccctgtgcctgcatcaggagaggtacttcataaattgtttctgcgtcgatagactgcacgacagccttgtcatccacattacagaattgagctacttttttgcggagtccgtcgctcagcgggtgttcggcacggagcaccaatacgtccggctgaatacctacgctctggagttccttgacagaatgctgtgtcggtttggttttcagctctccggcagcggcaagataaggcacatatgtcaggtgtacgcaaagagcgttcttacccaactcccatttcaactggcggatactttcgaggtaggggagtgattcgatatcacctaccgtaccaccgatttcggtaattacaaaatcgaacttgtatttgttgccgagcaattttacgttccgtttgatttcatccgtgatatgaggaatcacctggatcgttttacccagatagtctccgcgacgttctttgtcaatcacacttttgtagatacgtcccgtagtgatgttgttagcctttgtagtctgaatacccaggaaacgttcgtagtgtcccaggtcaagatcggcttcatggccgtctacggtcacatagcattctccatgctcataagggttcaatgttcccgggtcgatgttgatatacgggtcaaacttctggatggttacattgtaacctcttgcttgcagcaatttaccgatggaggatgagatgatcccttttcctaaagaagaggcaacaccaccggtgacgaaaatatactttgtttctcccacagctataactgttttaattatttttacttagtagtttcttacgaacttaaaaagcgcaaaattataaaaaaaaggggaagaatgcagactttcccctctacaattttattaaaaaatgcaattttgaaagattcctatgttttctaaacaaaataatgtagatttgcaccaaattaggaatattatgagaagagagttattatcattcgtagtttttacctcgactttatctttatcgctttcagcacagaccgccactcaaccttctaccgtagtggcaaaagcgaaaattgtgaaggcagacacgctttcgtcagaacttcagaagtatttaatgcttaaattgaatctgtccggagaaactcctaaattggacactgtatcaatcttatataataagtatatcggtcagttggactacctgaatgacccgtctgtaccggaacggtatattccgtccgatcctgactattttcgtctgtttactccgttagcctattattatgctccgatggcgcagtattcaaaggtggattggaaaccggtacagtttgactctttgcccgacaacttgagtaagttgacagcggaacttcttccttatgatactttggcatatacgaagtccgagcgtgccaatcaatcggtcaataaagcactgatggctctttatctcaatcatccggaattggttgtcaccacggaaaaccgtatcatgagccgtgatgtcttccgtagggatgtgaaaccgaagatttctccgaaggcatctgttgtccatcttttccagccggaagaaatgagcaacgatgtgggcaaggcaaaaatgaaaatcagccgtcctaactggtgggttaccggaggtaacggttctttgcaaatcagccagaaccacctttctgagaactggtacaagggaggagaaagtaactttgccggtctggctaccttgcagctttatgccaattacaatgataatgagaaagtccttttcgaaaatcagttggaggctaaactgggtatgacatccacaccgtcggataaattccatgattatctgattaataccgaccagttccgtttgtacaataagttaggattgagagcgttaaagaactggtactatactatttcttccgagtttaagactcagttctgtcacggttacaaagccaatagcgaagaacttgtttccgcattcctgtctccggcggatttggcagtcagtatcggtatggactacaaattgaataagcagaaattcaatctttctgttttcatcggtccgctgacttataacttgcgatatatcgacaattcggaagtagatgaaaccaagttcggtctggagaaaggcaaatgctctaaaaacgacttcggttctcagttgcagtcaacgttcaactggaaaatcatttcggctgtttcactggaatcccgtctgaactatctgaccaattacgaatgggtgcgtgtggagtgggagaatacattcaactttgttttgaaccgctatctttctactaaactttacgtacacgcccgttttgacgacagttcaaaaccaaccgttgaaaatggcagctttttccagctgaaggaattgctgagcttcggtattaactataagtggtaatttttttttaggcacggattacacagatttcacggtttcaggaattaagtaactaaaaaccgtgttaattcgtgtaatccgtgccttattttatctctatgtcctcaacgttgaaatgatataccttcccggattatcaatctttccccacttggtggtagacagcgtgatccatatctgcgtccccttctttccataatccgacagcttgagaatagctgtaatttctttcttgtttgttactccatgttgtgccaggctgtccagaagtcctttgacgttgtgcgtactcttgttgtaggcataaccggggatttcgagcgaaggcgaagccgtattgtcttcttcctcttctgctttccttttctctcctttactttgtctggaaatgtcagcaatttcgggtgaaatgttctcattttccagtttcaattcaccttgtactgacgaattgtttgcgtcctttgtattattttccttttcctgtttttgggtgtcattgactaacaggtagggcaaatcttctaactttcttttcctgcggcaggtagcatctatccagatgtgctgaatttcaagggaagtcaatatctgaaacttctcatagctttctttgtcaaagaatcctttgtcaagcaaaatttgaatgattccgtctatctcttttcctttcagttctcctcccagtttgcgggcaaaaatcaacgattgttcctcaccccatgggatgtaatatccttctttgaatattttacatagaagtttgcatacagctccatccactctgatgccatatttggcttcagccagttcaatggcatctctgtcgaaaaagtttacggtaagcgggaaatagtctacgcttaaataagttgtactcatatcagtcttattgtttgtttttaagtttatacaattggtttccaatcgagaaaattctcaatctgaaaggttctccatcctttctcttccatgcaccagaatatgaaggtactgtgtatctgcttcatgtcataagagtggtgaaagtctttggaataagaaataagagtgcctgtaactaactgaaaactaccgttctgtctgtagtatgcgatgatggcatggccatattgcatgtagtctgccagtgatttcactttttcggctattcgttctgcgatcgattccgaataacctttctctgatacgatacgttttttccatacttctgttaatcgatcttttttttcttctgttttgttagtggctatcagccgtttttcttttgtcattacattataaatttgttagtaaaatagttatatttaaagaaaaggcggaactatctgtaggatgcttacactatcgtgcgatgatagttacactatcctgccgggatagtgacactatcttgctgttatagtgacactataatttctgccggatagttcgttcatttctttatctaaaaaacgggggcaaaagtataagttgtattttttcgctccaattattcttgctattttctactgtgatactttgatttgtattgttctttctcttctttttcgtgcttcgaaattattccgattcctttgcttaaactgctaatttcgctgagtatactcctgaatttcattaatctatatccatgatgtgtgtttacgtaaaagattctccagtctgcaatgtacttggctagtcctgttaaagattttacgtaggaattaaactcgtcatcttcgtaataagtgcgaagacaggcaatgaaatagtgttttttttcgcctgtgatgccatttctttttctgacctcatcgatgtcaataatttcgtcatcatcctgataatcagtttcaagacttctcttcttttgtgtgccagttgcatttttcaggcatttttttgtcgttgtcatttcttttgatttaaataaaattaataaatggcattaagatggaaattccaaattttcgccctataattgtatataaaataactagtgatgcaaataatgaataaaaatggatttagccgatgtggggaactatacatcggccttttacgaaaagaaggtcgtttttctacggcacatgtctatcaaaatgctcttttctcttttaataaattttgtggtaatgccagtgtatctttcaggcaagtcactcgtgaccgattgcgtcgttacggggaacatctgtatgattcgggcttaaaaccgaatacggtatcaacgtatatgcgtatgcttcgcagtatctataaccgtggggtagagttgggtagtgcgccctatgtacatggtctgttccgtgatgtgtatacaggagtggatatccgtcagaaaagggctcttccggtgagtgaactccgacggcttctttacgaagatcccaagacggattgtttgcggcgcacacaatcgattgctgctttgatgtttcaattctgtgggatgtcttttgccgatttggctcatttggaaaagtcggctttagattgtaatgtgatccgatataatcgaattaaaaccagaactccaatgagtgtggaagttttggatacagctaaggaaatgatgaatcagcttcgcaattcccagtcatcgcgtccgggttgccccgattaccttttcagtatcctttccggtgataagaaacgtaaggatgaacgtgcttatcgtgaatatcagtctgcacttcgccggtttaataatcatttgaaaagtttggcgagggctttgcacctgacttctccggtaacttcttacacgattcgccattcttgggcaactactgcaaagttccgtggagttccaattgaaatgatcagtgaatctttagggcataagtctataaagacgacacaaatttatctgaaggggtttgagttgaaagagcgtacagaggtaaatcgtaagaatttgcattacgtgaagacttgccctttaggtcgaatttgaatggttaaaaaattgataatcagcactgatgctggtgtgttacttcttaggtaacggatttaaatttgacgcaaagatagacaaaaacacatgtattaaacaaataaaaacctactttttttcgatttaaccctgaatttgaaaaaaaatgtatctgaacatgaaaaaggcctattttcatgcttaggaatttatatgcccaattttcctaagaatctctactttttctaaagccaagatgctctcaaccctcattagtcgatacttttcgactttttccttccgatttattatgaagtgtacttttccgttacctaagaagtaacggaaaaacatggggtaaaaaagtatgattttaacaaaagagaaatcactaaatgctgggcctatttatgggacaggggaaggcgtagcacactcaaaacgctggtatgttgcattagttcgtatgcatcatgaaaagaaggtttccgagtatttgaacaaggtggggattgagaattttgtacctgttcagaaggaaatccatcaatggagtgatcgccgtaaattagttgaatccgttcttcttccgatgatggtttttgtacacgctgatccgaaagaacgtatggaagtcctgaactttactactgtgagccgttatatggtgatgcgcggtgagagcagtcctgctgttattcctgacgaccagatggcacgtttccgtttcatgcttgattattcggatgaaacagtctgtatgaatagctcccctttggcacgtggtgagaaagttcaagtaattaaaggacctctgcaggggcttgtgggtgagcttgtcaatgtagatggtaaaagtaagattgctgttcgactgaacatgcttggttgcgcctgcgtagacatgccgattggctatgttgagcctataggtgaaaaaaactaagtgggtaatgacgacttcctgtttacaagaaaaaatcgataaacttcaaaatactgttcatgctctgctccataaaagtaattatatggcgggtgtgtatgttgatgatcttgcacgactgaacaacgaaatccatgaacagatcaatgatctgtatccttgtcacggtaagactgctgagcaggaagctgctttgtgtctgtctcttctgatgggatatagtgtgtctatgtatgccaattcagaggatgaggcaaagaagaaaactgttctgaggcgttcgcaaatgattctgaaaaaccaattgccttcaccattgaaaattcagttacacacaatctacgataaactattgtcatagtaaatctactttttggaaaaagactttataatttattggggtatttaaattatgaaacacgcatttgaccgttttgttcaatatttgcagaaaaactattttagttattggattgtattaggaattgatacgttcatagctttgatttgtacctgggtgtcatttatcggcattcattatataacggagacttctaaagaaatcacttctcttttccatattttagcgatttcggtgatctccagtgtcttaggttcctttttattccatacctaccgtaatacgatccgcttttcccagttgaaggaattatggagacttgccggaagtgcactgataaaagcagtctgtatcgcaatggctatctggcttttcttgcctcagacgggactgcataatagtcagaaaatagtctttgtactgtttgatggtatgctgacttttattgccatggtaggcttccgtattcagttgattctggtttatgaactcctgctgaatatgctgaataagaagaatatgcatattctgatctatggtattgatgataagagtgtggcattgaaagttcggctaatgaacagctcccactataaggtggtaggcttctgtatctacggaacaggcgactccatccgacgcgtggctgatcttcccgtttattcatttaaggatgaagagtgctttaacaagcttattcataagaaatgtatcggcggcatcctgtttgcccgttacgagaatacccgtgaagaggaagaccgcctgcttcagtattgtaaaaggagtggattgaaaacgttgattgctccgagtatcagtgaggctgacgaaaacggaagtttccaccaatgggtacgccctatcaagattgaagacttgctgggtcgttcagaaattcatatcaatatggaggaggtgatgactgagttttgtggcaaggttgtgttggtgacaggagctgccggtagcatcggtagcgagctttgccggcaactggctcagatgagcatcaagaagctgatcatgtttgattccgctgagtcacctttgcataatgtccgcttagaatttgagaagaattatcccaatcttgattttgttcctgtcattggagatgtccgcgtgaaagaacgtctccgtatggtattcgaaacttatcagcctcagataatctttcatgccgctgcctataagcatgttccattaatggaggaaaatccctgtgaagctgtattagtcaacgttgtcggctctcgccaggttgctgatatggcagttgaatacggagctgaaaagatgatcatggtttctaccgataaggctgtaaatcctaccaatgtcatgggatgctcgaaacgattagctgaaatctatgtacagagcttgggctgtgctatccgtgagggaaaagtaaaaggtcataccaaatttatcactacccgttttggtaacgtattgggtagtaatggttctgtaattccccgttttaaggaacagatcgagaatggcggtcctgtcacagtgactcatcctgatatcattcgtttctttatgactattcccgaagcttgtcgtctggtaatggaggctgccactatgggtgaaggcaatgagatatttgtctttgagatgggaaaggctgtgaagattgttgacttggctacccgtatgatcgaacttgccggttatcgtccgggtgaagatattgaaatagagtttacgggattgcgtccgggtgagaagctttatgaagaagtcctgagtgataaagagaacacaatccctactgagaataagaagataatgatagcgaaggtacgtcattatgaatacactgatatccttgatacctatggagagttcgagaagttatcccgtacggtaaagatcatggatacagtgaagctgatgaagaaagtggtacctgagtttaaatccaagaactcaccgagatttgaagttttggataaataaccagaataatctataacactaacataaatcaacaatggatacaaaagaattgaagattgctgttgcaggtaccggctatgttggtcttagcatagcaacgcttttgtcgcaacaccaccaggtgacggcagtcgatgtgattcccgagaaagtagatatgcttaatcgtaaacagtcacctattcaagatgagtatattgagaagtatttatccgaaaaggaattaaatcttacggctacacttgatggtgccgaggcctacagtgacgctgattttgtggtcattgcggctcctactaactatgatccggtgaagaactattttgatactcatcatatagaggatgtcatagatctagtgttaagtgtcaatcctgatgctgtgatggtaatcaaatctactattcctgttggatattgtcgaagtctttatgtaaagtatgctcaaaaaggagtaaagaagtttaatctgttgttctctcctgagtttcttcgtgagagcatggccctttatgataacttatatccaagtcgtatcattgttggttatccaaagttgattgatagtgagcagttcgacgaggaaaacgaagctattaaggtcattgcggatattcctgccctagagaaggctgcacgtactttcgctgcattgcttcaggaaggtgcaatcaaggaagatattcctactctttttatgggtataaaagaggcagaggctgttaaactgtttgctaatacttatctcgctttgcgtgtcagctattttaatgaattggatacttatgcagaaataaaaggtctggattctcagtcaatcatacagggcgttggtctggatcctcgtatcggtacacactataataatcctagttttggttatggcggttattgtttgcctaaagatacgaaacaactattggctaattatcaggatgtacctcagaacatgatgactgctattgtagaaagtaatcgtacaagaaaagattttatagctgatcaggttttgtctaaagttggatattatagttatagcgaccaaaatcattataataaggtacaagagaaagaatgcgtcattggaatttatcgcttgaccatgaagtccaactctgataactttcgtcaaagtgccattcaagggattatgaagcgtatcaaggcgaaaggggcaactattgtaatttatgagccgacaatgcaagacggtgagactttcttcggcagtcaagtggtgaatgacttggcaaagtttaaagaaatgagtcatgctatcatcgctaaccgttatgatagttgcttagacgatgtgatggaaaaagtttatactcgtgatattttccaacgagactaacagaagaataagataatatgtaagcactcactgtatggctcttgttatttttccttttccctcttacttttgtgtcgaacttaaagaatcgagaacaatgaacatgagtgaattgaacgtatgatgaaacctgtttgcttgggtaggaagaactatctgttctgtggttcggagcaagctgctaaaaacacgtccttgatttactcgattatagaaagttgtaagatgaacaggcttcgctctgttaaatatattgcggatgttttacgaaaattaatatccgacgaaactgattacatggcacttctgccaatgaatattgcaaaataacttaattattaatcaaaaatataactcaatatgggctacaataccgtcaaaggtattatagccatacagtgagtgcttacagaataaagaaaacaaacatatgttcaacttagagaaattcattgctgattctgtgacctttcgtccagtcagtatgtttgcagcagatattgaggcaaacaaagagatacttaccttagaaattaagggtaagaaagtttgtgtaataggtggagctggaagtattggctccagtttcatcaaggcggttcttcgctttgaaccagcatctgttgttgttgttgacctcaatgagaatggtctagcagaacttgtgcgtgatgttcgctcaatcgaagggctttacgttcctgacgagtttcgctgctacactcttaattttgcagacccaattttcgagcgcatcttccgcgaagagaagggtttcgatattgttgccaatttttctgcccacaaacacgtgcgctcagagaaagacaaatattccgttcaagcactcatcgagaacaatgacatcaaggctaagaagctgatggatctcctctgcgtctatccacctaagcacttcttctgtgtctctacagataaagctgctaatccagtcaacatcatgggagctagcaagcgcatcatggaagatctagtgatggcctacaacacccgattcaaggtcactaccgcacgcttcgccaatgtagctttctccaatggttctcttcctgatggatggatccatcgtctccagaagaagcagcctttggcagcaccttctgacgtaaagcgctattttgtatctcctgaggagtctggtcagatatgtatgcttgcttgtatccttggtaatggtggggaagtattcttccctaagttaggcgaagaccagatgttcactttctctgctatctgcgacgatttcgtgaaggcagaaggcttcaccaaggtagaatgcaagaacgatcccgaagcaaagcagtatgccgctcagatgtcgtatgagagtgacacctatcctgtcgtgtatttcaaatctgacaccacaggtgagaaggcatacgaagagttctacatccctggagagaagatcgatatggagcgttttatgagcctcggagtggtttgtgaaagcacccgtcgctcgatgaacgaagtaaatgatttcttccttgagcttgaaggcattttccagaaagatgacttcactaaggcagaagtagtagaatccattaaaaagttcatctctaacttcgagcatgaggagaagggcaaaaaccttgatcaaaagatgtaattaacggataattcgtgttaaatgatataagacgatggtagattacaataacacaatagacttcatcaagtccctttatggtaacaaggagtttactcctcttgccattcctgtattcgcaggcagtgagaaagcatatctcaacgagtgtatcgacaccactttcgtttcgtcagtaggtaagtttgtcgatcgcttcgaggaagatatggcaaaatataccagtgcaaagcgtgccgtagtgtgcgtgagcggaaccaacgctcttcacatgtcgctcctactcgcaggtgtgaagaaggatgatgaggtactcactcaggcacttactttcatagccacttgcaatgccctttcatatattggcgcacatccagtgttcctcgatgtggataagagcaccatgggcctttctcccgatgccatgaaagaatggcttcaggctaatgcagaggttcgcaagaatacccgcattggtgagctctcagagtctcaagactttgctttccatgaggatgaactcgcttgctataacaagaacaccggtcgtcgtatcaaggcttgtgtacctatgcacactttcggtcatccggttcgtatcgaggagattgcggtcctctgcaaagagtaccacattgaactcatagaggatgcagcagaatcaatcggttcgacatacaaaggaaaacacaccggtacattcggaaagataggagcaatctcgttcaacggcaacaagaccatcaccaccggtggtggcggtatgatgctcttcatggacgaggaactcggagcttatgcaaagcacatcaccacgcaggccaagatttctcatcgttgggagttccgtcatgaccacattggcttcaactatcgtatgccaaacatcaatgcagccctcggttgcgctcagttggagaatctcgacaagtatgtagctagcaagcgtaaggtggcagctgaatacatcgagcacttcaagaatgaggatgacatcgacttcttcgcagaaccagagaactgcttctccaactactggctctcagccgttgttctccgagacaaggaatctcaactcgactttctccagcagactaacgataatggagtcatgactcgtcctatttgggaactcatgaatcgtctgccaatgttcgagaactgtgagaacgacggtcttaggaacaccatttggtttaccgatcgtgtagtcaatatcccttcaagcgtacgtcctgaagatttgtaaaaaacaagaactatgtctcaactcacatatagactcgcaaccttatccgatttcgaagatctttatcgtattaagtgtgataaagagaacattgcatggggtggatttaccaaagctcctgaaaaggactctttctatcaatggtatttgcgacagttagcatctgactgtcgttggatataccttgtatatgaaggagaggattgctgtggtttcttctatgtagataaactggaggatggtacatacgaagttgcatcatcaggtgtattatctgaatacatgggtaaaggtataggtacttatgctctcgctatgcaagttgctgaaatagaatgtttaaattcggggggtattttcttgggtatcagacagaaacatcgcttcctacaagagatatgagaaactgggattcatccgaacggatgaattcgaagtcagaaatttaccacttctcgggggtgaacataagttttataaatggataaaaaataagtaagtcaacttgaagtggttatcaaaacaagataacaatgccacttcaattgacatacagaaaagcaacagtaaaagatttgaagatttatatttaatcaagtgcgatcaggcaaacatagaatggggaggattcaaagaggcgccaaatcgtgagcgtttctttgaatggtacaaaattcaaattacatcagacaagcgtaccatataccttgtttatgaccttgataatccatgtgcattcttttatatagataaggtggatgatgtaacctatgagttttcttcttctggagtcctgtctcagtatgtaggaaaaggaatcggttcatatactgttcgggttagaatagaaatcatccgaagacttggaggaaagaatctcattacatggatagccgaagataacattgcttcttacaagaggtttatcaaagaaggtttcacccgtacagaagaatatgaaactcgcaatctccctcttctcggaggcgaacacaagttttatcagtggattaaagaattataaattatgtccttcatcactaaccgcaccaaagcaaacttctacaacgagagtcagatgacttttttcgttcagaaggattgtgtagatatcatcttcaagattaagaaaggtgtgtatctcacagtttcggcctattctctctctgagggtaggctgctgctggcgtgcgattgggggacattctggaatcgactgaaaggtatgcgtaatcgtaaggatgtattagcgaaattcaaaaaggcttgtcctttggctaccaatatctttaccaataccgtatcacctcacttcgcgtatatagataaggaacagtcgcaaggggcggtagtgcttgaaatgaaagctcctgttcagactaatagtatttctgattatcttcatgaaaaggtgatagagaaggctatggaactggtgaagtacaatctgaatctgtattgtgagttggaagagaaatgttcgttctttgcttggaagaccgatttgcaaaatttaaaatagaaaacggctgggggattagcacggttagctagagtgtttgcatagcatgcaaaaggtcatcggttcgagccctatattctctacaataaatcaatagaaaacaaatgaagaaagtttgcataataacagctgcgcgttcagagtatggtttgctacgatggactattgatggtgttcagcagaatataaatcttgaactccagctggtagtcacaggtgcacatctgatggctgaacatggctatacatataagtgcatcgaggaagatggctatcctatttccgcaaaggtagatatggggctcaatagtgattcgaaggaagtcatcgttgaggctatgggacgttgctgcatgggctttgcaaagacctttgccacactccagcctgacttggttgtagttcttggtgatcgttacgaactgcttcctatctgtagtgctgcgcttgtgatgaacattcctatcgcacatatctctggtggtgatgtcactattggtgccattgacaacgaagtgcgtaatgccgtcactatgatgtctgctattcatttccctggagtggaaaagtcggcacagaatatcattcgtatgcgtaactctgatgctcacgtgtgggctgtgggagaacccgggcttgacaacttctgcagaagcactctgatgactcgccagaaactggcagagaatatcggtattcctactaacagtaaatggattcttgtaacgcttcatccagagaccaatgaatcgcttgactacaatctacagatggcacgaaatatcatagctcttacagatagcatgatggatgtctcaatcattatctcaaaggcaaatgctgacttcggaggtaagcagattaacgactattggacagaagtggagaagcagaatccagagaagtatcatctctttccatctctcggacagatgcgctacctcagtttcatgaacgagtgttatgccgtcctcggcaactcatccagtggcatagtagaagctccttgcttgggtacaccagtcgtcaatatcggcaatcgtcagactggtcgctttatctgtaaaaatgtgcatcaggtagataacaacctcaaagaaattcagaaggcttggaacgcgatagaagctaatccagagcgcatcaaggatagttactatggcgatggttgtactgctgaaaagattgttgaacacatagaagaatatctttatgcaaaatagtcgggttataggtggagagtttgatgtagatcttcagggactccaatacactcagagcaacaacggctcattagagggtgtgtataaatattcttcaggtcgttctgctctctattacattcttcttgatgtacagaaacgatatggcattactgctgtctatcttcctgattacctctgttcatccatagtgactgcagtcgagaagagtcagatgaaagtagtattctataacctcaatgatcagcttgagattgatgttgaaaaacttccactcaaggacaacgaaaaggctgccgtattgcttatcaactactttggactcaagaacctgcagcctcaggtagaatttattcgctctatcagtaaggagataatcgtaatagaagatgatgtgcaggctttttatgagttccgcaaaccggagctcatagcagactataagttcaccagtcttcgcaagacctttgcctgtccagatggtggattggtgaagactgctaacgaccttccgcttgtctccgcagctaataagtttcatcagtacaaactcgctggcagcattctcaagtcgcttcgtaaaccagagtattacgatgatgatgtctatcttcatctcttcgagaaaggtgagagccacatagatgacgagattgagaagggcatgagtcagatttcgcaggaggctatcactaagacagacttcgagcgaatcgcttacatccgccttcgtaacatccgtcagatacttaatggactcaaaacactaggcatccgaactattcttcctgtgtccaaagacaaaataccactcttcgtacccatctggttagaggacagaaacaaggttcgacgacagatgttccaacagcagattttctgtcctgtgcattggcctcttgaaggcatggatgtacagaagggtgtagagatggctgaacatgagatgtctatcatcattgaccaaagatatactaataaggatatgtgttttattctcaccacattagagaaagcattgaaataatgataggatttacagaacattggaatgagtactttgaccgtattccagccgaattgttggatctgtattttcgtgaagaatacgtaagactctacgagaccgagagcgagaaggcttgctgctttgtatatgaggccggcgacagcatcatgcttttcccattcctgcttagagcttttgagtacaagggaacaatatactacgattttgagactgcctacggttatggcggtccggtgtcaaacgatcatagtgaggcctttatgacagctgcttttcagactatgatagacaaggctaaggcagaaaactatgtctgtggctttacgcgcttccatcctctgcttgaaaactgggattacttctataaggttggttgcttgattcaggatcgtaagaccatcgccatcgacctctcaggaggcatagaagccacttggaggaacgagattcataccaagaaccgcaatgtcatcaagaagggtgagaagaatggtctggaattcgtagttgataacgacttcacatatctaaaggagtttgaaaagctttataactccactatggacaaactggaggctgatggtttctactactttgaacctaagtattacgaccagctgaaagataccatccagaatcgttttctcggcattgtgaagcatgatggcaaggtggtggcaggagccatcttcttctatcagttgccatacggacactatcatcttgcaggtagcgacaaggcttttctcaaactctcccccaacaacttcctgctttggggggctgctaaggaactgactacaaggggagtgaagcacttccaccttggtggaggaactgatggctcagaggagaacagcctctatcagtataagcgcaaattctctaagcacgaatatcagttcaccctaggcaagatgattttcaatcctttgctttacgatgaaatttgtgatgattgggctgtggctaatcctgaaaaggccgagaaactgaaatacattcttttgaaatataaatactgatacaatatgcatacatatataattgctgaagcaggcgtcaaccataatggtcggctcaatcttgcgctacagctttgcgatgccgcaaaggctgctggtgtggattgtgtgaagttccagacttggcagactgagaagattgtcactcgcaaggctgagaaggcaacctatcagtcggagaatacgcatgatgttaaagagaaccagtttgacatgctcaagaaactcgaactctcatacgaagatttccgcatcgtgcaggagcattgtcgtaagattggtattgacttcctttctactcctgatgaggagcacagtcttgccttcttgatgaacgaactccatcttcctatcatcaagattggttccggagaggttaccaacatcccttacctccgtcagatggcatcctacggcaagcctatcatcctctctacaggtatggctacacttgttcaggtggctatcgcctacgacacccttcttgcagcaggtgcttcttcggtagcattgctccattgtaccaccaactatccttgccctaagaacgaagtcaaccttcgcgctatgcagaccatgagggaggctttcaagtgtcaggtgggctattccgatcatactatgggaactgagattcctattgctgccgttgctctgggtgcggagattattgagaaacacttcaccctcgaccgcaatatggaaggacctgatcacaaggcttcgctcgaaccacaggaactcaagtatatggtcgattgcatccgtaacattgaggttgctcttggcgatggtattaagcgtcctaacccaagtgaggtggagatttccaaagtggtgctcaagtccattgtggcaaaagtgccggtgaagaagggtgacatcctttctgtcgacaatattaccatcaaacgtgccggaagcggtatttctgcagcctattgggatatggtggtaggcaccaaggcgcttcacgattttgaaattgacgaactcataaagattgattaagtctatgcttccattagtcattattccagcacggggtggtagtaaaggcatacctcataagaatatcaaggagttgggcggtaaaccattgatttattatgcgattgatgctgcccgcaagtttaccaccgacgataatatctgtgtctcaaccgatgatgataatattatcaaggttgtggaggattatggtttgaaggttccttttaagcgtcctgagtatttggctaccgacaatgcaggcaccaatggagtgctccttcatgcgcttgacttctatgagcggaagggtaatcactatgatatggttgtgctccttcaagcaacctcacctttctgtagagcagaggatgtgattgaggccaccaaactctatgatgatagtatagatatggtcacttcggtcatgccagccaagtgtaatccttattacgatggttttgaagacaatgcagaaggcctccttaccattagcaagggggatggtacgatagaacgacgtcaggatgctcctcgcgtatggcagcagaatggagctgtttatgtcataaatccagagcaacttaaatccaagggacttgcaggaatgaacagagtccgcaagtatgtgatggacgaaattcactctgttgatctcgacaatatgctcgattggaagattgcagaaatcatgttgaaagataaattgatagagatatgagaaaatatataatcagcgagatcgcctccattcgtgaagctctcgttgccattaacagcataacccacgatggcgagtcgctcatcgtagtgaatgtcgaccagcagatggtgggctcactcactgatggtgacatccgccgaggacttatcgctggggcagaactgactgatcctatcagcaaaatcatgcatcgtgactttaagttcatcaagcaagaagattacgatgtggctcacctcaagtcgttccgcgaccgtcgcatcatgttcatcccgattttggatgcagagaatcatgtggtggatgtagttaacctccagaaattcaagtcaaagcttcccatcgacgccgtcctgatggctggtggaaagggtgaacgtcttcgtccgcttaccgagaagactccaaagccattactcgaagtgggaggcaagtgtatcattgaccataatgtggatcgcctgatttcttatggcatacagcatgtcaatgtgactgtcaactaccttggagagcaactggaaaagcactttactactcctcgtgatggtgtgcaagtacgtaccttccgcgagcccaaattttttggcactattggtagtatcaagttcgtagatactttctacaacgatactgtccttgtgatgaactccgacctcttcaccaatatcaactatgaggacttctttctccacttccagatgcacgatgcagagatgtccgttgcggccgttccttacaatatcagtatcgaattgggtatccttgaccttgatggacgcaacatcaaggggctcattgagaaacctaagtataactactatgccaatgcaggcatctacctcattaagaagcgtgcccttgccgagattccggaagataccttctttcatgccacccatcttgtggagaagctcatcgtccaaggcaagaaggtcatccgctatccgctcaacggcacttggattgatattggcactcatcaggagtacgagagagcaaaggaattagtgaaacatttgaagtaaagcaaacccgaatagaatgtttagaaagataattgactatctcaatttgcgtcaggcaggaggcttggagttgttttttgccttgctgatgattttgagtgcctacagttttatgggtattccgttacaggttgttctttggagtggtttgttcgctttactccttttcaagcagaacaagaggcaaatacctatgtttaagcctttagtggcattagctgcttttgttctagtacatgattttatctatctgtttattgcaaagggcaatctgaatgcttacatcatgcagatattctactttggtagtatcttcatggctgctaaagtatttgatattgagaaattaaaaggatcgttgaatctcgttgcgcttatatctatggtaggccttctctaccagtggggattgattgctgcaggaggtgaggttcgcccaatacagctaccattccttgatatgggcgagagcagattggagacgttttctgttcgaccttcttctttctttatggagccagcagcctatgttgctttcatgtatttgccacttgctttctccttgatagaacgaaaattcatttggacagcagcaataatcttgtctgagtttttgaccacatcaacaactggactccttacttcctttattgtgctcattgtttatgtatttactcaaaaggtaaacttcaaaatcagattctttactgtagctatgggagtagcaatgttgtttgctctcaccaatgttgaggcgttccaaacaggtgtgaataagttggaggataccaatgtggagacaaatatgcgattggcacaaggtccgtatattgtgagtactatggagcctttggagatggtggcaggtgctgcatatcataatgcatacgattactgcatggcaggaagagcacctatggtggtattctacaaggaggaggtatatatgtcaacagcatggatgattgtccttaagtatggttttattggcttattcctttatttattggtatattataagataggcagaggaaacagagaaataatcccattgattatttgtttagttgcaactatgttctcatcgggatatggtttgggaatcaattatgtctatacttcgattggattaatgttgatgtattctaactatcaggaactatcgtacgagaattagaaatgaagaaaataggtatcataacatacttctacttctataattacggtactatgttgcaaggatttgcaacacaattgctgtttggaaagaatgatggagtagaagttgaattaattgattatagattcggtaacaagactgctcgtcggaagattgacattcttaagatacgtctcaaacgcttacttgtgtatttcaaggagtttaaacgtgtgtatctgacaggcaagtatgcttcattgatggttcacagatataagtatttcaatgaatttgcatccaagtatctcaacctctctcaaaagaaatatatgtatgagaacgagattgcagaggatgctcctaagtacgacatctatattaccggttcggatcagacttttagccctaaaattgggttctcgacagctttgttcttgaattttgctcaaaaggacgctgttaaagctgcttatgcaccaagtttaggagtttcatctctcacagaagagcaggttgcatacattggaaaggagttgaagaagtatgatttcctttcgtgtcgcgaatctctcggtagcgaaatgttggagaagattacaggacgaaaggttgaaaccgtacttgatcctactctgatgattcattctgacgattggactcaattttcagtaaagccaaatgtcaaggacaagtatatactttgttattttcttggcgatcgcgactactatagagcttatgtagcccaactttccaagcaaacaggccttcttgtttactacattcctgtaagttggaaggatttaaaaaaaaataacaatctgctttgggaagtaggtccttctgagttcttgggattgatagcaaatgcagaatatgtgtgtactgactcgttccatggtaccatctttagtgtaaacttccatcgtgaggtacgggttttcgtgaagcatgcaggaaatgtggctggtggcgacaattcccgattgtttgatattcttgagagattgggccttgagaaacaattgataacagaatacacaaagggttccattattgaggattctcatattgattactctcatgtagatgaactgctttctgttgaacgagagaagtcaatgcgatatgtaaaatcaatcgtaaactctgtgaaataatgatagagatttgcaagaaacaagattgtgttggttgtggggcgtgcctttctgcttgcaataaggatgctatcactatgcagcctgatgcattgggattcttctatccggagattgatcagggcaaatgtgttaattgtggcttgtgtgcaaagtcatgcttcaataataataagcctacatacaatgagcctattgacacttgtgtaggttatgcagtaaacattggcgaacaagtctcttccacttctggaggacttgcttcggtttttatggggactattcttaagaacggaggtcttgtctatggctgttctggggaaaatgctcgtaaggtaaagcacatccgaattgagaaacccgaagatattgagaaactgagaggcagcaagtacgttcagagctacatggggcagatctataagaatgtagttgctgatttgtgtgctgacaaaaatgttcttttcattggtacaccttgtcaagtggctggtttgataacctatttgaagggcaagacctacgacaaactctatactgtcgatttcgtttgccatggagtcccttctcagcagattttgaatgatgcaatagatgccaaggtaaatgagcgtgaaggcttgcgtctcgtgaatcgtgtgaaggaaggcagtaaggaaagcaaatacactttgcgtctaattaagaatgggcaggtagtatgcgatgatacttatccttctgaaggttatatcacgggcttcctttgtggtctttactatcgtgagaactgctatcaatgtcagtttgccagaagagagcgcgtgtcggatgtgaccttgggcgacttctgggatagattcgacaatgtaaaaggattggcgaataagaaagatggattgtctatgataatggcgaatactgaagcaggaaagaaactgctgtcaatgtgtgaagattcgtatgctcacgcagaatgggattacgaagatttcattcgcaggaacggacaacttaaacaacctattagaagacatccaaagcgagatcaatttgaaaagatatatgcgatagcaggatatgatacagcattatctgaaacacttcaccaagatttgaagaatatcagaaagaatattcttttaaatactatttcgtcaataataaatcgaactccagttgtcagaactatatataagaaacttagaaatagataaatcaatatgtcgagaaaaagtattaagagtgtcttgacactaacaacacaatacgccaataatatgggagcgctattgcagtgtcatgctttggcgaaatatcttaatatccaagagtctgtagattgtaaggtactgcaatatcagcctgaaggatataataagagttggtcattctttaataagcctttgacttttcgagatttaatcaagaatatttattgttttctgaatccaaaccttctcgttccaaagatcaagaagcagaagataatgcggaagttcattagcgattacatccctttgacgtcagaacagtataagcgaaaagatattgagcagaaccctccaaaggctgatgcattcgtttgcggtagtgaccagatatggaacttcaagtaccgtcgcgatttgacctatttctttgattttgtcaataaggaagaatcgcgcatcatagcctatgccccaagtattgcagacccttggaaggaagaagatgcaaagttcatcgctccatatttgaagcgtttcgattcgctatctgtacgtgagactcctaatcttcttcaggtgaaggaactgtcgccagagaataatcctactgtggtttgcgatcctgtcttcttgcttgaaaagcagcaatgggatgatattgcggacaccaagttagaaccaaacgaaccgtatatcttctgttacttcttgagtgtgacaccacttgccatagaaacggtcaagaagatgcgcgagttgactggtctcaaggtggttcactttaacctgaatgcccttgataagttcaagagcgagtacaacatccgcattgctggtcctacagactttgttggcttaattaagaatgccacatacgtttgcactaactcgttccattgttctgccttctctatcatctatcgcaggaacttcatgttcgtacctaagaatatggcaaacgagcgtatcacaagcttggtgggcaagttccgcctttctgatgtgtttgtctctaaagataagataaagacaatgactatagaagacctgaaggtggactattcgagaacagaaggttgcatcgaaggatttatcgctcaatctaaagagtatttacataacgctttgaaagatgaaagacaagataatcaagcttgcagataagagtgcttgtacaggctgtggggcatgtgcagatgcctgctccaagtcttgcattactatggtgaggaaaggacttcatatctacccccagattgatgcagagttttgcataggttgccaaaagtgcatgaagacttgcccaagtatcaacccactcaattcggtagaagtcagcatccaaaagtattatgcatgttggcataaggatttgtcagcagttatgacctcaacttcaggaggcgtaggtacggctttggctgaacacgctattgactgcgactactatgtagcaggtgtggtgctgacgagtgagggagaggttaaacacgtaattgctacaaacaaggaagatatacaagctttcaaaggctcaaaatatgtgcagagcaacagcattggcatctatcaagaatgcatgaaggcaattaaggaaggtcacaaaattcttttcatcggcaccccttgtcaaacagaagcaatgaaacgaatactccattccagtttgcaagatagccttctcacatgcagcattatctgccatggtgtaaactcttcgtttgtctggaatgactatcgaaatagcctcgaaaagaagtgtaagtcccatatagagaaatataacttccgctgtaagtcacatggatggcaaaaacagaatggaggaccgaacttaagggtatcgtacgaaatgatctctggaaagaaggccgatatgccaagttggcgcaatcttttccactactggtttggtcagcatttcatcatgcgaccttcgtgtttcaaatgccagtataggactgaagaccggcattcggacatcgtcattggtgatttttggaatgtcgaaaaggtgcttgatgatatggatacctgcaatggtgtttcagcagtgataactaccacagtacgaggtgaggaattccttcataccaatccgtaccttaatgcgacaccagttgacgcgcagaaatcaaaaagtgtgttgaaaggcttgatcaatagaaagtctgaagaaacccaaaacaaagaaatcctgcgaatggggacatttgagcaggagtatagtcaggatggttttgagtatatggcaaagaaatatccttgccctacttacattgaccagattattaacaaaataaaatcaatgatatgaatattgaaagcatcaagaaaattgtgctgtactttatgagcaaacatgctctccgtaagtactacaatcgcttgaagaggactaataagattacgaatctcacccaagcgcaaaagcaagagattcaggcttactacatggataactatagcgtgaatgttaacactaagtggcacgagattctgtattcaatttcaggagtctatcgagtagactatatgccatttgatgtatatggtcagttgcttgagcgattctcgccatttgcctataaaaaggtgcttgatgataaggtgctatacgattggctgctacctgatgtaaagctgcccaatagactctattcgtcttgtaatggcgtgatatacagatatttatctggggggggtaagcggaggtgttaatgtcggatttacttgaagccattaagaatatcgacaactgtattattaaaccttcgaaagactcatctgccggcataggagtgagaagcttgcgagtaacagatgatatcgtttccgattatgacggtagccttgaaaaacttataaagagttacaagggcaactttgttattgaagagaaagtggtttgttgcgacaacttgagaaatttgaatccttcttcgtgcaatactctacgtatgcacacttggcgcaatagaaaagaaaacaagattgagttcgtttctgctttccttcgtgtaggtcgcaaggattctctcattgataatggatttgccggtggaattgccattccagtaagagtagatggtgcattgtcaaaaagcggatgtacgttaaagacctataagagatacgaacagtctgatactggtatcaccttcaagggatataagattcagcagtttgacgagatggtgcaggtagtatgcgatgctcatcacaatctgcctcactttgacctcattggatgggatgtaacgatcaacaataagaacgaggtggttgtcatcgagtttaatcctgaccctgacatgcgactcgatcagttgatattcttggataactgcttattggataaaaaagaaaaaatatacaaggtacttttcaaacatgattaaattagcaatcagagatgatgatatgaatttcttcacgaaagtggaggatcttgaatatatatataaagattttaatcattttcccattagctatgcagtagttccttatgtgctggatgtctcaacccgaggcgtatgttctgatacgaaaggaaatacaatgccacaggatgtggcagacaacaaggcattggtggaatgggtgcgtcatgaaattaagaatggaacttgtgatgttcttctccatggagttcatcacagctataagtttaccgacaaaggtgtaaagctcgcagagatgcaatggcgtgataacgaacccaatcttgcagacttgttgagagcagagaaggagcgcctatcggctttatttgattacccaatcacgtgctttgttgccccaagcaacaagatcacaaagtattgtctcggtcaggtagctaaagcaggattgaatttctcaggcattatcccgatgaaaccaaacgtaaacctgacaataaaaaatattgctaactatgcaaagcgttggatggtgagagccatacataagttgccttatcctggagtgctgcagtatgataaccataaggaggtaaatgcttgtatttttcagacctacgactatttggttaagatgtttgaattctgttgtaagcacaactatcctatggtcatcaatgtgcactactggcatcttctcgacaatccgacagaattggagaaactccgtaaattcgttatggattatgccatcccaagaggggcaattcctacacgtttgagcgatctattaaagtatgcatcaatataatccaaacagataatgtcatcatcgaaattagttagatcgtccatcatagtcagtttgatattggctgttggctatttggtttcctttgtcaaagaatccattatagccaactactttggagtatctgccgatgtggatgcttacaccatagctatcaccatacctgtagttctgttctctatcgttacggtatctatccgctctgtaatagtccccatctattccgacttgctgtataacatgacaaaagaggtggctgatggatttatcagtaacacgctatgttgtgtaggtgtagttatccttgctctgattgtaatcatggaactgggagcgggtttcttaacaacgttttttgctcctggatttgatgctgctactcatgatttgtccacaagccttttacgcattacactgccatcaatcctgtttactgtaataaatgatgtgctggtaggacttctgaatgtacataagcgctttattgctccttcgtgtgttgtattctttctgaacattggtctgattttgaccattgtgttcctgcattcacagtttggaattgtagcaggtgcccttggttacatcattggcggaggattgagcatgttctacatcttaattatatcgtcgggagtatatcgtttccgctttatgctcagttttaaggatgaattctttaaacgaactctcaagcagacagttcctgtagtatggagtaccagcattgcagaagtcaatgcagtcattaaccgaatgattgcttctttcctgttcgtggggtcaatctctgctctcagttatgcaaataagattaattccatatttatcagtttcttcattacagctgtagcaacgattgtatatccgctctatgcggaatcatcggctaagaaggatatggatcaactttcgcatagagtaaacttcacgctttcgctctataccatgatcttgttaccaatggttcttggagtgttgtgttacagaaaagaattggtgagtgtggcttttgcccgaggtgtgtttgatgcgttggctgtagcaaccacctcttcgttactaggttgttactgcttaggtctgctttttatgtcgtttagagagacgcttactaagatgttctactctatgcaggatatgaagactccggcgaagaatgccaccatcggagtgttgctgaatgtggtgctaaatcttacattaccttttgttcttggtgtggaaggacttgcctttggtaccagctttactgcaatgttcatctcgttgaggcttctgtaccttttgaaaaagaattataaagaattgcggttggagtactttcagaaaaacttgatcggaattgcattagctacggtagtgatggcagttattgtgtttgccttctcttacttttatcaaggtgacaacaaccttgtcagattggtaatcggagctggaattggtgtcgtttcatacacaattggcatctgggctttccgtgtgcctgtatttaaacaagctttacaaatgataattaaaaaataaattatatgtataagtatctgataattaatacgatatgggcgctggctcctgaatctgtaatagtgaattacgcttttgatcaaggatggatcaagggcagaatgattgataagaagtgccaactttctgagaattacttttgggatgctaatggtggtgcttttgtggtatagcagaatacatatatcgtgatttcgaagtcagcaagattaacaaatacaagagagaaatcattggcatgtgggctgcatttgtctatagaggcgggaaggcatattgctttaacgactattggggcctgtatgacatttgttttcatagctcagaggataatacctttgtggtttcaacatctttggcagatgtacatgcaaatgtgcctgatgcaagaatcgatgaatatcctttcgtgatggacaactttcagttgggtgccttccttggtgacaccatgtttaaagagattaagcgcctgaagagagagcagtatttggaaatcacagagtgtggattgaatttgaagggactctctgattatagatataagtatgcgtttcaaaacaagcagcaaacaatacaggatattgtatcctatgccaaaaaactttctgttaaaattgctgctcgtttcgggaaaactgctgttgcaatgaccggtggttttgactctcgactggtatttgggatcctcaattctgctccaaataatgacattacattggtacatggagtgtcatctggtactgaaaaggaagatatggagattgctcagaacatagcaaagcactatcataaggattttattctcgaagattggaataatcgaaaaggatttaaccttaatgaccagttcaatattttcagaatagtagattattacaattatgtaggtttaggaagcaagcgatgctatagtgaatatgagcgaatcggcaaaggctataccttctatcaggctggatacttctgcgaagctctccgtttgagggaatgggcagagcagaagaagtcatctaccttctctttgacggattatgtggataactactatatcaacaagagtctgaaagagtgttatgcgaactatgacgaatatcgcaattacttggtggaaaagtatcgtgagcaattgaaagaaatagggtttactggtgacgagaatagaatacctatggactatttcgaaagattccgatggataatgtcccgttactgtgattcccgctctgttatgatgctgaacagcttccagtttactttcccgattatgtcaactccattcattcatgagatagtcttgtcattgcctactgacgtgatcaaaggcggcggattccagatagaattggtttcggcaatgaacaaggaactggtcgaactctttggattgcactctcatagaagattatatcgaattaaaaacaataagaaaattccattgctcataatgaaaaacgttgctgactactgctttacgttgctgcctttcatcaaaccgatgatgttcgcagtatatagaaagtttaagtatgattcaacaaatgttcgacatggagtattggatgagtttgaccagctatcagttaaggtgcccgagtatttggatcttacaaaatatccagaggtaccatatcgcttgagagcaactatgataggcttgtcgtgcgttcaaaatgaaaagtgaacaataatagtcaatgaaaattctttttataactccctacattacctctgcatgccatccagccttcctgagaaaccagactggcttcggatacatggtacatgatatagcacaatatgtagccaagacggaggaggtggatatatttgcaaccatggctttcactccaaagatggaagtggatggtttcaaagtggtgggcagaagtaaatggtctctactaagaaatctcagtttgaagaatctgctggacggattccgtttcatcaacaggtattctatgcctctcaaggagagcctaagaacgctctacatctttgctgccatcggacaggtagaacacatcatgaagcagtacgatgttgtgcacatccatggatgctcgtccataacagatgctgtcatcaaggcttgcaaaagacaaaatatcccgttcctcgtgacactacacggattgaatagcttcgagaagcttatcaaacttcattcttcgttatgtcgctatgaacgtgatttcctgaaagaggctgtaacaaatcattatccagtatctttcatcagtactggcaatatactgacggtggaagcagctacaggaaagacggctgatagcttccgagtgatttgtaacggttgtaatgtggaacgaaagcctatgaaagttgacatccgtaaggaatatggcatttcagccgatgatttcgtatttgctttcgttggcaatgtgtcggctaacaagaatcaggcgcaggtagctcgtgcatggagattgttatcggatgatcttcgtcagaagtgcaaagtgctgtttgttggacgttatacagagaatgatgaactggttcaatatattcgtactaatcatccggaagaaaatctctttatttgcggaatgcaaccaaaggagaaggtctcagacttctatcatgcttgcgatgctaccattctgacaagtatcactgaaggtttcggcttgagcattattgagggctttgtttacggcaaaccgaatgtgacatttgctgatcttcctgccacatcggatctctatgacaagaaggctatggtactggcggaagatagaaatgatgaaacgttggccaaggcaatggagagaatgatgcagacaagatttaataaggatgagatattaaagtattcgttgaagttctcttttgagaagatggcgaagaagtattgtgaaacttataacagtattaaaatatgaagaaagttgttatgtttttcgttgacttgttccgcaaggcaaagcactatattagcaccttcctcttgaagtgtcaacttgtagagtatggcgacaatgtgggagctagcaaaataatcagaatctctcgacaggcaaaggtgtctgttgggcataattgtggatttaatggtttgattataagtggattggggagggtaaaaattggtgattattttcactcaggaaccaatatcctgataatgttgggaaaccatgattatgaatatggcgacaagattccgtacggtagtcactacaagccgaagaatgttataatagatgattttgtgtggcttggaagcaatgtcatcatctctggcaatgttcatattggtgaaggtgctattgttgcagtcggttcggttgttgtgaaagacgtgcctccgtatgccatagtcggtggaaatcctgcaaaagtaattaagtatagaaacattgagcagtttgaacaacttaaaaaagaaggtaagttctgatgaatgtatttaaaatcgccaaatttctgcagaaaggaaacaaaggatattttgaagtgccggtgaatgaacaattggcatatcttgatggcttgggaaacgcatcaagtgacatagagagaagctataaacagttcctgtgtcaggagtattttgtgcccacttggaaacggttcttatggtgggttgtttctgttgcagcaataccatttcttttgataattctttatttgagaggtcttcgagtgagacccatcaaaaagattgatacgattgccgaaaatagaggtatgactgaaatcatacctctagaactgtcttcaaaatatgaccttgaatttggtgtatggcattcaggcgttggacttaatggtagtgacattcattatatctttcgcagaataataggatggagacagccatattttatgatgaagtccatattacgaatcgcatcattcagtccaatgattactaagttttctccagagagaatcattcagtatggtgaatacagtttctgctcgtctatgctgacggattatttccatactagaggtgtgaagaatatcaatgtgcaacatggtgagaagttgatgttcatcagagattctttctttcattttgatgaatgttatgtgtggggtgattattacgtgaaaatgtttgtcaggatgaaagcagaacctaatcaattcattgtttctgtacctccgagtttgaacataaatattgaagaacataatagtccgtcttgctatgctgactacaagtattatctcgcttctgaaagcgaggatgatattcggagtattgttgcatctatggcctttgcaaagcgtgaaggtaagactgtaaaatttcgcattcatccacgatatacagacctcaacattctaaagaaatatgttccagaatcagaaatagagcttccatcgaaggttaatattcttgattctatcagcaatatggagtatgctgttggttgttatactactgtattgcttcaagcatgtctatctggaaagaaagtgattatcaacgatgttactttccaagaacgatacggacagttgaaggagtatggttatatcctcgcaaaggatgaaattgaaaaactttcacaaagattgtgatggaaatatttaaaatactatgtttctttttttctaccatgcctggtcagttgtgctaccacatcaaaactccctcaggttcagaataatcaggaaatacagcttaataaaactcttgaccttcgcgggcaggattggttgttgccagaaggtgcaaaattggtctgtacgaagaagggtggagtgaaaaacggaagggtattagggtggaatgcaagtgtggtgaatgtgactgtagagtttgtccatttttcaggttcgtttcgtgagctcgatattcagttgatgaatgatgtagatttgctttgttatgatgtttcggctattggtagtctcaatgttcaaagcaatgggcatgttgttagttctacttctttcggaaccttacgcaacacagtgcttcaaggaggtagtattcgattgtgaaagaagcactagtcctttcttgtatgtgattggaaatggacagaatgctttttctgtagaaggttgcagatttataaatatttcagaaatagaactactcaagccgaggaatatgttgaatccggttgttagaggttgtgagttctgcggtttgctcagagaaggaggtcgcacgaaagagccatacagtgagtgcttactagagaaagaggttgaagaatgggctgatgtcggaggaacagaaggtgttgttcttagagctttgtgagataggagtggcgagcatacgagaggaaggcgaaagcgtgaattaacaaatttacatttaacatagtatcaatgcaagactacggattagtgagcatcatcacacctacttggggatgtgctcaattcatttcagatacgattcgttgtattcaatctcagacgtacactaactgggagctactcatacaagatgattgcagtaccgatgggacagcaaaagttgttgagcctttcgcagaagccgattcaaggatcaagtatgagtgtaatcctaaaaacctgggagctgctataactcgtaataatgctctcaggcgtgctaagggacgttggatagcatttttagattctgacgacctgtgggagtccgagaagctggaaaagcagttgtggtatatggtggagaatgactataagttttcttacacagcctaccaggagatggacaatgacggacgagagacgggtgtggtgatccgtggcccgaagcatgtgtcgaagctcggaatgtttgcgttctgctggcctgggtgcttgacagtgatgtacgaccgtgaagcggtgggattggtgcagattgcggatatcaagaagaataacgattatgtgatgtggctgaaggtgtgtcgcaaggcggactgctacttgctggacgaggtactggctaagtaccgccgtgggcgtgtgggctcaatctcaacgcatgggtactcgacaatgatttgttggcactacaagctgtggcatgaggcagaggtgatgaataccgtttgcgcgatgttttggacgggcgtgaatctagcttgcggtgtgtttaagaaattggtatatgtgaagaaaaacaaataaagatatgatactgaaatgtttttttgaccgagtgctcgcattgattggcctgctgtttctgtggccggtacttttagtggtagctgtcatggtgaaagtaaaaatgccaggcggacctatattttttgttcagaaacgagtaggtagaggaggcaagttgtttccttgtcataagttccgcacgatgactgttaaccataacggttctactgtgtctgttgcgggtgactcgcgcatcacaccgtttggtgctactcttcgtcattataaactagatgaacttcctggattgtgggatgtattaattggcaatatgtcgtttgtgggacctcgtcctgatgttccgggttatgctgataagcttgaaggagctgatcgtgatgtgctaaaacttcgtcctggcatcacagggcctgcaactctcaaatatcgcttagaagacgaaatgatttttgagtatgtggcaaagaggcaggctgaaggagacactcgccctatgcaggagattgctacggaatataatgatactgtaatttatccagataaagtacgcttgaattgctattactatcgcaactattctttcataaaggacatagagatgatctttgcaaccgttttaggattcaaggtgaaatttgcaggcgaggaaatataaaaaataagaacattaaaatattagttatatggctacagaagaaagaaaaactatttacctctgtctcgctcatatgagcgaagaaggttatgaacagaaatatgtgaaggaggcgtttgacacgaactgggtggtaccaatgggtcctaatgtgaatgcatttgaagacgatttgacgaagtttgtaactggcaatgtggagagcactgtatatcaagactctcgttggcctgaggctactcgtgcggcttggaaactgaatcctgcactgaaagatactaaggtggtttgcctgagtgccggtactgctgcggtgcaccttgctctcatagcttgtggcgtaaaatccggcgatgaggtatgcgttcagagtttcactttctgtgcatcatcacaccctgtcacttatcttggtgccaggcctgtgttcatcgactcggagcgtgaaacatggaacatggatccggaactcctcgaaaaggcaattcttgaccgtaaggagaagaccggtaaatatccaaaggccatcattccagtagctctctacggtatgccatacgactgcgagaagattatggctattgccaataagtacgacatccctgtcattgaggatgctgccgaaggcatgggctcacgttttaacggtcaggtgcttggcacttttggacgtttcggtgttctgagctttaatggtaacaagatgattaccacctccggtggtggcgctctcatttgccagaatgatgaagatgccaacaatgtgatgtggcatgctactcaggcccgtgatgcttatccttattaccagcatacggaaataggttacaactatcgtatgagtaacgtatgtgcgggcattggacgtggacagatgactgttcttgatgcacatatcgcacatcacaagcatgttcaggtactttatgaggaattactgaaggacgtccctgaggtacatattcacaagcagcctgctgattctcgttatgatgcgaacttctggctttgtgcagccacccttgatgcggatgttaagatccaaggacaggagaatgcctacaaggaagtcgtcaagacagctgtaggtggcgcagctggtgttatcaaggcagtagattgcgctgccactgactgtcagccaaataataatgtagaagctcttcgtgtcttcatgcttaataagaaggttgagtgtcgtcctgtatggaagccaatgcacaagcagcctgtttatgctgatgctgtagcctacgttaatggcgtatcagaagaagtcttcaaggtcggattctgtctgcctgcaggaccttatgtcaccgatgatgatatacgctacattgtaggttgtattaaggaggctatcgtaaagtaaatgagaattgtataatccccaagaaagaaatatatgaaacgattgaaacaattattctattgtgtattggcggcattaatgtttatcggctgccagtcctacaaaaaagtaccttacctgcaggatgctgaagtggtattgtacagtactcagaacgaacagttgtatgatgcaaagatcatgcccaaagacttgttgactattgtagtgtcatgtaccagtcctgaactggctgcgccttttaatctgacagtggctacacagagtaatgctgttttgaattatacgactactcagcctgttctgcagcaatatctggtggataatgaaggtaatataaactttcctgtattgggtgaacttcatgttggtggattgaccaagaaggagaccgaacaaatgattgtggaaaagttgaaaccttatattacggaaactcctattgtaacggtacgaatggtaaattataagatttccgtgattggtgaagttgctcgtcccggtacattcacgatctccaatgaaaaggtgaacatcctggaagccttggctatggcaggtgatatgaccgtatatggtctgcgtgatgatgttaagttgatacgggagaatgccaatggtaagcaggaaattattcctttggatttgaataaggcggagactattctttctccttattactatctgcagcagaatgatattatttacgtaacacccaataaggcgaaagctcgaaattcggatataggtactagtacaagcttgtggttctctgctacttcgatccttgtttctattgccagtttgttgtttaacatcttgaaataaaaagaaagaggcatgaaagaagaaaatcaaaacgtgaagggacgtgaaatgactgaggaacagatcgatttccgggcactgttttttaaatacatcattcactggccttggtttgtaggtgcggtgttgctatgtttggttggtgcgtggttttatttgcactgggctaccccgatttataatatttccgctacagttctgataaaagacgagaagaagggtggaggtgcaggactttcttcggaattggaggatatgggattaagcggcctgatgacatcttctaaaaacattgataatgagttggaggtgctgcgttcgaaaactcttgtaaaagaggttgtgaatcagttgggattgtatataacttataaagatgaggatgagtttcctgctaaaggtttatataagacatctccagtgcaggtaagtttgacaccgcaggaggctgaaaaattgaaaacttcaatggtggtggagatgaccttacagctagaaggcagtatggatgtgaatgtgattgttggcgaaaagggctatcagaaacattttgagaaattgcctgccatttttccaacagatgaaggtacattggccttttttcaggctgttgattcagttgctttgcaggatggaacgaaggttcctcggatagagaagagtgtacgtcatataactgcgacaataaataaaccgatgagagtggcaaaaggctattgtaacagtctgtctattgctcctacctctaaaacgacttctgttgctgtgatttccttgaagaactccagtttgcagcgtggacaggattttatcaatcagttgcttgaaatgtataatcgcaatacgaacaatgataagaacgagatcgcccagaagacagcagaatttatcgatgaacgtattggcattatctcaaaagaattaggtagtacggaagctaatttggagtccttcaagcgtgatgcgggtatcacggatttgacgagtgaagctcagatagctttggctggtaatgctgagtatgaaaagaagagcgtagagaatcgtactcaaatcagtttggtaaatgatttgcgcaagtatctgagaggcaatgaatacgaagtattgccgagtaatgttggtttacaggatgtcgccttgatcggagcgattgaacgttataacgagatgttgatggaacgtaaacgcctgttgcgtacatccacagagaataaccctactattgtgaatttggatacaagtatccgtgccatgaaagccaatgtgcaggctactcttgagggaaccctgcaggggttgatgatcaccaaagagagccttgatcgtgaagcaagccgttattctcgtcgtatcagcaacgctccgggacaggaacgggcctatgtgagtattgcccgtcagcaagaaatcaaagctggattgtatctgatgttgttacagaaacgtgaagagaatgctattgcacttgccgctactgccaataatgcgaagataatcgatgaagcgatagctgatgatattccggtatctcccaagcgatctatgatctatttgattgcgttggtacttggtattgggattccagttggtatcatctacttgattgaactgactaaattcaagatcgaaggacgtgccgatgtcgagaaactgacgagtgtgcctgttgtcggtgatattccattgacagatgagaagaatgataagaatggttctatcgctgttttcgagaacaagaataatctgatgagtgaaaccttccgtaatattcggaccaatcttcagtttatgctcgataatgatcagaaggttatccttgtaacttcaactgtcagtggtgaaggtaaatcattcgtttcgtcgaacctggcaatcagtctttctcttttgggaaagaaagtggtaattgtcggactcgatattcgtaagccgggactgaataaagtattccatctctccaataaggagaaaggtattactcagtatctttccaatcctgaaacggacctgatggaacttgttcaaccttctgatgtgaatcagaatctgtttattcttccgggtggtactgttcctcctaatccaacagaactgttggctcgtaacggtctggacagagcgatagaaaccttgaagaagagcttcgattatgtaatccttgatactgctcctatcggcatggtaacggataccttattaataggtcgtgtagcagacttgtcagtttacgtatgtcgtgctgactacactcataaggcagaatatacattgatcaatgaactgtcttttgagaagaagctgcctaatctttgtaccgtcatcaacggcgtagacttgaagaagcgaaaatacggttattactacggctacggtaagtatggcaagcattacggctatggtaaacgctatggctacggctatggatatggccaagatacaaaaagataaatatctgaatatctatgaattataacttttctcagaaaaagagccccggaaggggcttttctttttgttatctgaaataaaagcctcacctttgcattgttgatcaacaaaacgtgaataaaataacttgaatttgaatcttttaaaaaacgtattatgagtgtaatttacaaggttgttacgcgaccatctgacccgcgtgttcccaattctcccaagaaatattatccgcatctgatcactttaggtcagtctgtcaatctgaaatatattgcgcagaaaatgcagggctattcttctttatccatcggtgatatcaaaagtgtgattcagaattttgtggagaaaatgaaagagcaacttctggaaggtaagtctgtgaatatcgaaggcttgggtgtatttatgctgactgcctgctcgaaaggggcggatgcggcgaaagacgtcaatgctaaaagtgtggatagcgtacgcatcttctttcaggcgaataaggaactgcgtatcacgaagacggctacccgtgcagatgaaaaactggatttgatcagtttggatgaatatctgaagaagttgaatgcctctgtgactccgaatgatccggatgatggtgaaaatggcggtggtggaaatgaaggaggagatgaggaagccccggatccgactgtataatctgaaaagcttaaaaagaaaggaggaaaaatctatgaagaaaacttggagtgtagttttgaaagtaatcattgctgtagccggtgcgattgccggagtactgggagtacaggctgcatcattgtaagcagcattcagtaaataaagtaattggttagataagacaggcaggcgggaagaactttcccgcctgctttgttgtatgctaaaatatcaaatagttggcgttactttttcgtgtgcgataacgaaaacacaaaaaataacattttattatgtagaaaaaaatgagggaatgcttcgtagttcacaaataatgattaaatttgccgcgatttgtaatgttgagtttgcaaaatgacgaataatactataaagcatctaggtattgtggaaaacatacagggttctcatctgtcggtgagaatcgttcagacgtcggcttgtgcggcttgtagcgcaaaaggccactgttcttcggcggatagtaaagacaaagtcatagatataacggatgttacagctgcttcctatcaggtaggagagcgggtgatggtgatcggcgaaacgtcgatgggcatgatggctgtaacccttgcattcataattccttttgtacttctgattgtttccctgttcgcatggatggcattgatagggaatgaactgtatgcggctcttctttctctggcagttcttattccttattatttcgtattgtggctcaataaaacgcgaatgaaacaacatttttcatttactataaaaccaataaataactaaaacattatgaatttgattctgattgcagtgatttcattgggagctatagcgctcgtgctggccgctattctttatgtagcttccaagaaatttgccgtgtatgaagacccgcggattgcccaggtgggggaagtgttgccccaggcaaactgtggtggatgtggctatcctggttgtagcggatttgccgatgcttgcgtcaaagccggttcgctggatggtaaattctgccctgtaggcggtcagcctgtcatggcacaaattgctgatattctcggactggcagctactgaagctgaaccgatggtagcagtagtaagatgtaacggaagctgtgccaaccgtccgcgtattaatcaatacgacggtgcgaagagttgcgctattgccgcttcattgtatggtggagaaacaggttgtagctacggatgcctcggatgtggcgactgtgtggctgcctgccagttcgatgctatccacatgaatcctgaaacgggacttccggaagtggatgaagccaaatgtacagcttgtggcgcttgtgtgaaggcttgtccgaaggcgatcatcgagattcgtccgcaaggcaagaaatcacgccgtgtgtacatctcttgtgtgaacaaagacaagggagccgtagcacgtaaggcttgtacagtgagctgtatcggctgtggtaagtgtgtcaagacttgtccgttcgaagctattacgctggagaacaacttggcttacatcgatccgaacaagtgtaaatcatgtcgtaagtgcgtggaagtttgtccgcagaacacaattatcgagctgaacttccctccacgtaaaccgaaggcggaagaagcaccgaaaacagttgctgcagaagctccgaaggtaacagaataataacagaataaaatacagaattgtatgttaaagacattttcaattggtggagttcatccacacgaaaataaattgtcggcacatcaacctatcatcacagcggaagtttctgcaaaggcagttattctgttggggcagcacattggcgcacctgccaaaccgatagtagcaaaaggtgatatggtgaaggtaggcacgaagattgccgaacctgccggcttcgtttcggcagcaattcactcttctgtcagtggaaaagtggcgaagattgatacagtagtcgatgcgagcggttatgcaaaacctgctatctttattgatgtagaaggcgacgaatgggaagaaaccattgaccgtagcaagacactggtcaaagaatgtgagctttcgtccgaagaaatcgtgaagaagattgccgatgccggtatcgtaggtttgggtggtgcttgtttccctacacaggtgaaactttgtccgccgccttcgttcaaggcagaatgtgtgattatcaatgcggtggaatgtgaaccgtatctgactgccgaccatcagctgatgctggaacacgcggaagaagtcatggtaggtgtctccattctgatgaaagccgtgaaggtaaataaggcatttatcggaattgagaataacaagccggatgctattgaactgatgacgaaagttgcttccagttatgcaggcattgaagttgttcctttgaaagtgaaatatcctcagggtggtgagaaacagttgattgatgcgattaccaaacgccaggtggcaagtggtgcgctgcctatctctactggggcagttgtgcagaatgtgggtacggcatttgctgtttatgaagctgttcagaaaaataaaccgttgtttgagcgtgtgattaccgtaactggtaagtctgtggccaaaccttccaacttcctggcgcgtatcggtacaccgatgaaacagctgattgatgcttgtggcggtctgccggaggatacgggaaaagtgatcggtggcggtccgatgatgggtaaggctctggtgaatatcgaagttcctaccgcaaaaggcagttccggtatcctgattatgaatcagaaggaagccaaacgtggtgaagcacaaacctgtatccgttgcgcaaagtgtgtgagcgcttgtccgatgggactggagccgtacttgctcggagctttgtccgaaaacggagattttgaaacaatggaaaaagaaagaatcatggattgtatcgagtgcggttcctgtcagttcacttgtcctgccaaccgtccgctgcttgattactgccgcttgggtaagggtaaagtaggagctatgattcgtgcacgtcaagctaaaaaataacgaagtatggaaaataaattaatcgtatcactatcaccccacgtgcatggcggagacagcgtacagaaaaatatgtatggcgtgctgatcgcactgattccggcttttctggtgtcgctttatttcttcggcctgggggctctgattgtcacggctacttcggtagcagcctgtttattcttcgaatgggcgatcgttaaattcttaatgaagaaacctgctacaaccatttgtgacggttctgctgtcattacaggtgtgttgctggcattcaatctaccttccaatctgcctatctggattatcattctgggtgcactgttcgcaatcggtgtaggcaagatgtctttcggtggtctgggctgcaacccattcaacccggcattggcgggacgtgtattcctgttgctttctttcccggtgcagatgacaacatggccggtagtaggtcagctgacatcttatatggacgctaccaccggtgctactccgctggcattgatgaaacaggctattcacggcgatgcgagtgctttgagccagatacctgatgcgctgactctgtttatcggacagaacggcggatgtatcggtgaagtaagtgcgctggcactgttgctcggactggtatacatgctctggaaaaagatcatcacctggcatattccggtttctatcattgtgactgtatttgtatttgcaggcattatgcatatggtggatcccgaaaagtatgtttctccggtattgcaactactctccggaggtctgatgctgggagctgtctttatggcaaccgactatgtgacttctccgatgagcaagaaaggtatgctgatttacggtgtttgtatcggtctgctgacggtggttatccgtctgttcggtgcatatcccgaaggtatgtcattcgccatcctgattatgaatgcgttcactccgctgattaacacctattgtaaacctaaacgctttggggaggtagcgaagaagaaatgaaaaagttacaatcatctttaaagaatatgttgctggtacttacgggcgttacagctgtttccgtagcgttgctggcttatgtgaacgaactgacgaaaggccctattgccgaagcgaatgcaaagacgctgaacgaggccttgaaaaaggtgcttcctgaatataccaataatccggtagccgaaagcgatactgttttcagcgagaaagacggaaagaaaatcgtggatttcattatctatccggccaagaatggcgaaaagtgggtaggttctgccgttgaagccaagtcaatgggatttggcggtgaactgaaagtgctggtgggctttgatgctgaaggcaagatttataactactctttattggcgcacgctgaaactccgggattgggttcgaaagcggacaaatggtttggagcttatgatcctgcaaagaacgaaaaaccggtatctcacgaagaaagtgcaaagtctattttgggcatgaatccgggagagactccattggctgtgaccaaagacatgaatggacaggtagatgctatcacggcttctactatcacttcacgtgctttcctgaatgcggtgaatgctgcttatcaggcatataaaggcggtgaggtggatacgaattccggagcttcccagaaaaatgaaccggctgttgcgccggaaggtgaagcagctgctaatgacactaataactaagaaaggaggagacagttatgaataattttaaagtaatgatgaacgggattatcaaagagaatcctatttttgtgctcctgctcggtatgtgtcctacactgggtacgacatcatcggcaatcaacggtatgggtatgggactggccactatgttcgtcctgatttgctcgaacgtggtaatttcatctatcaagaatctgattccggatatggtacgcatcccttcatttatcgtggtgatcgcgtcattcgtgacactgttgcagatgataatgcaagcatacgtgcccgatctgtatgctactctcgggcttttcattccgctgatcgtagtaaactgtatcgtattgggacgtgcggaagctttcgcagcgaagaacaatccgctggcttctatgtttgatggtatcggtatgggatttggttttaccattgccctgactctgttgggtgccgtacgtgaattcctcggaacaggtaagatattcaatctgaccattctgccggaagaatacggaatgctgatctttgttctggctccgggtgcctttatcgctttaggttatctgattgccattattaatagtctgaagaaagcctaactctattaaataagaaaagaatatggaatatatattgatatttatctcggcaatctttgtaaacaacattgtgttgtcgcagttcctgggaatctgtccgttcctgggtgtttccaagaaggtggaaacagcgatgggtatgagtgcggcagttgctttcgtgctgactatcgctaccatcgtcacattcctgattcagaagtttgtgttggacgctttcggattggggtacttacagacaatcacttttattctggttattgccggactggtgcagatggtagaaattattctgaagaaagtttctccttctttgtatcaggcactgggtgtgttcctgccgttgattacaacgaactgctgtattctcggtgtggcaatcctggtaatccagaaagactttgatctgctgacaggtgttgtatacgcattctctactgctcttggctttggtctggcactggtattgtttgccggattgcgtgagcagatgaccctggtgaagattccgaaaggaatgcaggggactccgattgctttgattaccgcaggtttgctggcaatggcattcatgggcttctctggcgtcgtgtaaaagactaagttgataattagataaagaggctggaaactctgtcgtatggcaacatacaggcagtttgtttccggcctttttctttatatctgttcataccgaatatgttttttatcataccaaaacgccctcaaatcgtcccgtaagtatcttcctgtgaataaaattgcgatagtttattgcatttccattttatttccatacatttgtacctcaaacaaactgaaaaccgaaaaactaaccatattttaaaattatatgaaagaaagaattttagtaacgggaggaacaggctatattgggtctcataccgttgtagaactacaaaacagtggatacgaagtaatcattatcgataatttatcaaattcgagtgctgacgttgttgacaatatagagaaagtatccggtatccgcccagcttttgagaaactggattgtcttgattttgctggccttgatgccgtatttgccaaatataaaggaattaaagcgattattcatttcgcagcaagcaaagcagtaggagagtcggtagagaagccgttgctttattatcgtaacaacctggtttctttaatcaaccttctggagttaatgcctaaacatggagtagaaggcatagtgttctcttcttcctgtacagtatatggtcaaccggatgagttgcctgtaacggaaaaggctccgatcaagaaagcggaatctccttatggaaatacaaaacagattaatgaagaaattatccgtgatacagtagcttccggtgccccgatcaatgctattttgctgcgttatttcaatccgattggcgcacatcctacagcattgctgggtgaacttccgaacggtgttcctcaaaacctgattccttatctgactcagacagcgatgggtatccgtgaaaaactaagtgtattcggtgacgattatgatactcctgacggttcctgtatccgtgactttatcaacgttgttgacttggctaaagcacacgtgattgcaatccgccgtattttggagcaaaaacagaaagaaaaagtagaagtattcaatatcggtacaggacgcggcgtttcagtattggaactgattaatggctttgaaaaagctaccggcgttaaattgaattatcagattgtaggccgtcgcgcaggtgatattgaaaaggtatgggctaatcccgattatgcaaaccaggaactgggttggaaagcggtagaaacattagaagatactttacgctctgcatggaattggcagctgaaactccgtgaaagaggcattcagtaaaaagatatttgttttaattaacataaaagtttaaacaaatcgttcatgcgatttgtttattagatgctaatcagcttgatctgtttgtgagtatgtgaatatgagtaaatggtacttatgcctctccggcatagacaggtatgattgcatagtagttttgtcgtgttttattttgtgtttgtgttgtgacggtactacgacgggagtcgtggtaccgttttttgttactcttttacagcctgcctttaaaacagaatacgttagttccccaatcggtttcaggtaaagttccttccggctcgaacaatccgtatacggaagaaccggaaccgctcatagaggcataaacagccccttgcctgtatagctcggctttaatttctccgatcaccggatgctgggggaatacgctgtcttcaaaatcattgattaatatctctttccattcatttaccgggcgtttgatcgcttctttgatcgagtattcgggatgatgagggtgaatattggcgaaagcttcccgcgttgatacgaatacatccggtttgatgatcagaatctgatatccttttaaggatagtggaatgggggagaatatgttaccgattccttcggcaaaggtcggggcgtttctgataaagaaagcgcagtctgctcccaaagttgcggcatatatttccagctgatcttcggataaattcagctgaaagtgttcgttgagtaatttcagcatgaaagccgcgtctgatgagcctcctcccagtccggcaccggaaggaatgtgtttgtacagatggatctcgataggacagaggtgaaactctttatctaatagcagatatgctttcaccactaaattgtcttccggattaccggatatctccattccgtactgatgcagggagaactttttgtccgcttcggggctggtccggatttccagcgcatcttcgagagcgacggggtagaatacggtttcgaggttgtgatatccgtccggacgcttctcggtaatagagagtcccaggtttatttttgcgtttgggaaagtgatcatattcgttctgaattattatttttgaattttaaattatgggttgcgaatttatgctattggtgacaaagttactaaaatcttcatttttccttatcttttcttcattattatattctatctttgtcatccctttcggattttactatgtataaaagccggggatcataaattgtaaatcataaaattgtatataagcagatggctgaacaaagaagaaattcccgtaacacaaaatcaactaaagtacaaccggtcaatgattatggtcgtatccaacctcaggcaccggagctggaagaggcggtgttgggtgctttaatgattgagaaggatgcttattcgctggtgagtgagattcttcgcccggagtcattttatgagcatcgtcatcagttgatttatgctgccattactgatcttgccgttaatcagaagccggtggacattctgacggtcaaagagcagttgagcaaaagaggtgagttggaagaggtcggtggaccgttctatattactcagttgagcagtaaggttgcttcttccgcacatatcgaatatcacgcccgtattattgcacaaaaatcgttggcgcgcgaattgataacgtttaccagtaatattcaaagcaaggcttttgatgagacactggatgtggacgacttgatgcaggaggcggaaggcaagctgtttgagatttctcagcagaatatgaagaaagactatacgcagattaatccggtaattgacgaagcgtataagctgattcagaaagcggctgcacgaacggacggtctgagtggtcttgaaagtggatttacgaaactggacaagatgacctccggttggcagaactccgaccttattataatcgctgcccgtcctgccatgggtaagacagctttcgtactttctatggctaagaatattgctgttgattatcggaatccggtagcgttgttctctcttgaaatgagtaacgtccagttggtcaaccgtcttatcaccaatgtttgtgagattccgagtgagaagatcaaaagtggacaattggcaagctatgagtggcaacagttggactacaaactgaaagatctgctggatgctccgctttatgtggacgatactccgtctttgtctgtgtttgaactccggaccaaagcacgtcgtctggtgcgtgaacatggggtgagaatcattattattgactaccttcagttgatgaatgcgagtggtatggcattcggtagccgtcaggaagaggttagtacgatatctcgttcgttgaaaggattggcgaaggagttgaacattcccattatagccttgtcgcagttgaatcgtggtgtggagagtcgtgaaggtattgacggtaaacgccctcagttgagtgaccttcgtgaatccggagccatcgagcaggatgccgatatggtgtgttttattcaccgtccggaatattataagatttatcaggatgatcgtggtaacgaccttcgcggtatggcggaaattgtgatagccaagcatcgtaatggtgcggtaggtgaagtcttgctccgattcaaaggtgagtttacacgattctctaatccggaagatgatatggttataccgatgccgggcgaacctgcaggtgccatgctggggtctaaactgaatgccggtgctatggctccgcctccgccggaaccggactttgttccgcagggaaataatccgttcggtgcaacggaagggccgttgcctttctaaaaaacgtcttttgggttgaatagaaatgaccgcttggtcagatgaaaatgaccgcttgattgaatgcaaacgaccgcttgatttactctaatcgagcggtcgattatttttattaaatataactataggagaactctgatgagaactggtggcaaaaatgacaagaaaatacctctatctgagaatatataataggaaaataaataattaatgaaataaaaatggaattttaaattagaattaattattttcccattatatgtatgaatacccctttattttttgccactttgtcaccagccatgaattttctctcaaatcgttctatgtcaaccgaaaaatcttattaactttgcgaaactttttgagaaacaataaaaatttaattatatgaatatctcttataactggctgaaagagtatgtcaactttgatttgacccccgatgaaacggctgctgcgctgacctcaatcggcttggaaacaggtggtgtagaagaagtgcaaaccattaagggtggtttggaaggactcgtaatcggtgaagtgctgacttgcgaagaacatccgaattccgaccatttgcatatcactaccgtcaatctgggagacggcgaacctgtacagattgtatgcggtgctccgaatgtagctgccggacagaaagtagtggttgccactttgggtaccaaactttatgacggcgatgaatgctttactatcaagaagtcaaaaatccgtggtgtagaatctacagggatgatttgtgcagaagacgaaatcggtattggtaccgatcatgcaggaatcatcgtgttgccggctgaagctgttccgggtactctcgccaaagactattataatatcaagagtgactacgtactcgaagtagatattactcctaaccgtgcagacgcttgctcacactatggtgtagcccgcgacttgtatgcttacctgattcagaatggcaagcaggctactttgcaacgtccctctgtagacggatttaaggtagaaaatcatgatttggatattgaagtagtggttgagaacagcgaagcttgtcctcactatgccggcgttacggtgaaaggcgttactgtgaaggaaagccccgaatggttgcagaataaattgcgcctgatcggtgtacgtcctattaataatgtagtggatatcactaattatatcgttcatgctttcggtcagccattgcattgcttcgatgccggaaagataaaaggcaatgaagtaattgtcaagacattgccggaaggcactccgttcgtcacattggatgaagtggaacgcaagttgaacgaacgcgatctgatgatctgcaacaaagaagaagcgatgtgtattgccggtgtattcggcggactggattccggttctacggaagctacgacagatgtatttatcgaaagcgcttatttccatcctacatgggtgcgtaagactgcccgtcgtcacggtctgaatacggatgcttctttccgtttcgaacgtggcatcgatccgaacggagtaatctattgtctgaaactggctgctctgatggtgaaagaactggccggtggcactatctcatccgaaattaaggatgtttgcgttgcagctccacaagacttcatggtagaactttcttatgagaaagtaaattcgctgattggtaaagtaattcccgtggaaacgatcaagagcattgttaccagtctggaaatgaaaatcatgaatgagacagttgacggactgacattggccgttcctccttatcgtgtagacgtacagcgtgattgcgatgtgatcgaagatattctacgtatctacggatataataatgtagaaatcccgactacgctgaactccagtctgactactaagggagaacatgataaatcaaacaaattgcagaatctggttgctgaacagctggttggctgtggcttcaatgaaatactgaataattctctgactcgtgccgcttactacgacggtctggagaactatccatccaaccatctggtgatgctgctgaatccattgagtgccgatctgaactgtatgcgtcagacattgctgttcggtggactggaaagcatcgctcacaatgcaaaccgcaagaatgccgatttgaaattcttcgaattcggtaactgctattacttcgatgcggataagaagaacccggaaaaagtactggctacctattcggaagactatcacttgggtttgtgggtgactggaaagaaagttgccaactcatgggcacacccggatgaaaacagttcggtatacgaattgaaggcttatgtagagaatatattgaaacgtttgggactggatttgcacaacctggtagttggcaatctgactgatgatattttcgctaccgcactttctgttcataccaagggtggtaagcgtcttgcctctttcggggttgtgacgaagaaactgctgaaagcattcgatatagataatgaggtgtattatgccgacttgaactggaaagaactgatgaaggctatccgttcagtgaagatcagctacaaggaaatctccaaattccctgcagtgaagcgtgacttggcattgttgcttgacaagaacgtacagtttgccgaaatcgaaaaaatcgcttacgatacagaaaagaaactgctgaaagaagtcgaactcttcgatgtatacgaaggtaagaacatcgaagcaggcaagaaatcgtatgcggtcagcttcctgcttcaggatgaaactcagacgctgaacgataagatgatcgataagatcatgtctaaactggtgaagaatctggaagataagctgaatgcaaaattgagataaatttaaaattcacaattcaaaattaatacaaaccaatgggaagagcatttgaatatagaaaagccgcaaagctgaaaagatggggccacatggctaaaacatttacaagactgggtaaacagatcgctattgccgtgaaggcgggtggtccggaaccggaaaataacccaacactgcgttcggtcatcgctacttgtaagcgtgagaatatgccgaaggacaatatcgaacgtgcgattaagaatgcgatgggtaaggaccagagcgactacaagagcatgacttacgaaggatacggtcctcacggaattgctgtctttgtagatacgctgactgataatacgactcgtacggtagctgatgtacgctctgtattcaacaaattcggtggtaacctcggaacaatgggatcattggctttccttttcgaccataaatgtatgttcactttcaagataaaggacggcatggatatggaagaactgattcttgatctgatcgattatgacgtagaagatgagtacgaacaggatgacgaagaaggaacaatcactatctacggtgatcctaagagctatgccgctattcagaaacatcttgaagaatgtggtttcgaagatgtcggtggtgacttcacttacatcccgaacgatctgaaagacgtgactccggaacaacgcgagactttggacaagatgatagaacgtcttgaagaatttgatgacgtgcagactgtttatacaaacatgaagccggaagaaggcggaaacgaggagtaagcggattatggaatatgtttatagaacccagggtacttgcagcacaaacatcgaactgaatgtagaagatggagttgtgaaggaagttgccttttggggaggatgtaacggaaatcttcagggactttcacgcctggtaaagggaatgaaggtagaagaggttatcaagaaacttgaaggagtacgttgcagtggcagaccgacctcctgtcccgatcagttgtgccatgcactgcatgaaatgggatattaacggaagtctccctttataaaatatacactggcctctggcaattcattttgccggaggcttttttattgtgccgtatctttccctatttgtcggtattttgaaccaaaatcgacctttggtcgttatttataagtatatttgtgctgaataaactattatgcaatgatgaagaatatttttcaagacttaaaacggaaagatcataaacgctatctgggcggactggatgtttttaaatatattggtcccgggcttttggtaactgtcggatttattgatccgggcaactgggcatcaaattttgccgcaggttccgagttcggctattcacttctttgggtggtcaccttatccactatcatgttgattgtccttcagcataatgttgctcacttggggattgttacggggctttgcctttcggaagccgctacgaaatatactcctaaatgggtatcccgtcctattttgggtacggcggtattggcgtccatttctacttcattggctgagattctgggaggagccatcgcattggagatgctgtttgatatgcctattatgtggggggcggtgctgaccactctctttgtctccatcatgctctttaccaactcctataaaaagatagaacgttccattattgcttttgtctcggtgatcggtctttcatttatttatgaattgtttctggtagagatagattggccggctgcgacgatgggctgggtgacacctgctttcccgaagggcagtatgctgattattatgagtgtgctgggagcggttgtgatgcctcataatctgttcttgcattcggaggtaatacagagtcatgagtataataagaaagacgattcgtctattaagaaagttttgaaatacgagttgttcgatacgcttttctcgatgatcgtcggctgggcaattaacagtgctatgattctgctggctgctgctactttctttaaaagcggtattcaggtggaagaattgcaacaagccaaatcactgcttgaaccattgttgggcagtaatgcggcaatcgtattcgctttggctctgttgatggcaggtatttcgtccaccataacaagcggaatggcggcaggttctatctttgcaggtatcttcggagaatcatatcatatcaaagacagtcactcgcaggtaggggtgatcctctcgttgggaattgcgctgttgctgattttctttattggcgatccattcaagggattactgatttcgcagatgatattgagtatccagttgcctttcacggtattcctgcaagtagggctgacttcatcccgaaaggtaatggggaattatgtcaatagccgttggagtacttttgtattatatgctattgcagtcatagtttcggtattgaatataatgctgctgttttcataaaacgaacataaatctataaactataaaatgatgaagattattacttataatgtgaacgggcttcgtgctgccgtttctaaaggtttgccggaatggctggtacaggagaatccggatattctttgtctgcaagagacaaaactacagccggaccaatatccggcagaagtgtttgaagctttgggttacaaggcttatctttattctgcacagaagaagggatatagcggtgtggcgatcctcactaagcaggaacccgatcatgtggaatatggtatggggatagaagcttatgacaatgaaggacgttttatccgtgcggattttggcgacttgtccgtagtcagtgtttatcatccttcgggaacgagcggagacgaacggcaggcatttaaaatggtgtggctggaagactttcagaaatatgtgacagagctgcgcaagactcgtccgaaccttatcctttgcggtgactataatatctgtcatgagccgattgatattcatgatcctgtccggaatgccacgaacagcggtttcctgcccgaagaacgggaatggatgacccgtttcctttctgcaggatttattgattctttccgtctgctctatccggagaaacaggagtatacgtggtggagctatcgttttaattcgcgtgccaagaataaaggctggcggattgactattgcatgaccagtgagccggtacgtccgatgctgaaaagtgccagcatactgaacgatgccgtacattcagatcattgtccaatggctttggaaatagaataaaaacagaaaatagcatggaagatagaatacaaaaagctgtagaactttttaagagcggatataactgctcgcaatctgtagtagctgcatttgccgatatgtatggtttcacacaagagcaggcagtgcgtatgtcagcctcttttggcggaggaatcgggcggatgcgtgagacatgcggggctgcttgcggactgttcctgatagccggactggaaaccggagctaccgaagcgacagatcgtgaaggaaaagctgcaaactatgcggtagtgcaggaattggctgccgaatttaaaaaacgcaacgggtcgttgatttgcggagaattgttgggattaaagaaaaaagagccgatttcgactgttcccgaagaacgtaatactcaatattatagcaaacgtccgtgtgctaaaatggtggaagaagcggcaagaatttgggtagaatacctcgaaaaacaccctaaataaggggataaaatgcttttttattacaaaatcagcaaaaaaagattcaataaagtgttatataacataaaaataactatctttgtccccgaaataaaatctgaaagctttcgggccggatgatttttaaagcatgtctaactataatttcaaaagcaaatgttgaaagaaaaagcaggtgtaatcgcaggtaatatctggaatgcactgaatgaaacagaaggaatgactgccaagcaactgaaaaaagcaactaaattggttgacaaagatttgttcctcggccttggctggttattgagagaagataaagtttctgctgaagaagtagaaggtgaactcttcatcaaattgatctaagcgagtaactcacttaagcaataaaaaaatgcgttggtacatgattataatgttatcaacgcatttttttatattccgccatttacgtatctttgcacaccaaaaagacaaaataataagaattcagaatgaagaatatacgaaatttctgcatcattgcccacattgaccacggtaaatcaaccctggcagaccgcttgttggagtttaccaacactattcaggtgactaacgggcagatgcttgatgatatggatttggagaaggaaagaggtatcaccatcaagagccatgctatccagatggagtacaactacaagggtgaaaagtatacccttaacctgattgacactccgggacacgtggacttttcgtatgaggtatcccgttccattgccgcttgcgaaggtgcgctgcttatcgtagacgcatcgcagggagtgcaggcacagaccatctccaatctgtatatggctatcgaacatgatctcgaaattattcccattatcaataaatgtgatatggcaagtgccatgcccgaagaggtagaggacgaaatcgtagaactgctgggctgcaagcgtgatgagattatccgtgcctccggtaagaccggaatgggcgtggaggaaatcctcgcagctgttatcgaacgcattccacaccccgaaggtgatgaggaagctccgttgcaggcattgatttttgactctgtattcaactccttccgtggcattatcgcttactttaagatcgaaaacggagtgatccgcaaaggagataaagtaaagttctttaataccggaaaagaatatgatgccgatgaagtaggtgtactgaaaatggaactggttccacgtaacgaacttcgtacgggcgatgtaggttacattatatcgggtatcaagacctcgaaagaggtgaaagtgggagataccattactcacgttgcccgtccgtgcgataaagcgattgcaggttttgaagaagtgaagccaatggtctttgccggagtctatccgattgaggcggaagattttgaggatctgcgtgcttctctggagaaattgcagttgaatgacgcttcgctgactttccagccggaatcttcactggcactgggcttcggtttccgttgcggtttcctcggattacttcacatggagattgtacaggaacgtttggatcgtgaattcgatatgaacgtgattactaccgtgcctaacgtatcttataatatatatgataaacaaggcaatatgaaagaagtgcataaccccggtggtatgcccgatccgacgttgatcgatcatattgaagaaccttatatcaaagcatctattattacgactaccgattatatcggcccgattatgaccctttgtctgggtaaacgtggagaactcttgaaacaagagtatatttccggtaatcgtgtggaaatatattataacatgcctttgggtgaaatcgtgatcgacttctatgaccgattgaagagtatttcgaaaggatatgcgtcgttcgactatcatcccaatggtttccgtccttccaagttggtgaaactggacatcatgttgaacggtgagccggtcgatgcgctttctacgctgattcacttcgataacgcgtatgatatgggacgccggatgtgtgagaaactgaaagaattaatccctcgccagcagtttgaaatcgctattcaggcagctatcggggctaagattatagctcgtgaaactattaaggcagttcgcaaggatgtaactgcgaagtgttatggtggtgacgtaagccgtaaacgtaaattgcttgaaaagcagaaaaaaggtaaaaaacgaatgaaacaaatcggtaatgtggaagtgccgcagaaagccttcctcgccgtactgaagctggattaaaaaatgaaccgcaagcgatttttcagagagttattctgaacaaatcggcttgcggttagttttttaatacaccaggtgattgtcttctgtctgcagagctttccttggcaatcaccttttttgaaacaaacaactataaatatgagaaaagttctgtctttttcgggcttcctgatgttggggctcgtcatttcacaattcctcccgatgatagcgggagaaggatatggaactgttaaggttctgtcgaatatactactttatgtatgtcttagttttataatgattaatgtgggtcgggagtttgtgctcgacaaagtccgctggaaaagttatgccgaggattattttatagcgatggctacagctgccctgccttggttcatgattgctatctattatgtattcgtgcttcttccgcctgattactggaacagttgggaggcttggaaagagaatctgttgctaagtcgttttgccgcacctacgtcggccggcatcttgtttacgatgttggcggctatcggattaaagtccagctggatatataagaagattcaagtcctggctatttttgatgacctggataccattcttttgatgatccctcttcagatcatgatgattggtttgcgttggcagctgattattgtggtggttatcgtatttatgctgttgtccattggatggaaacaactgaataagtataactggcggcaggattggaaagctattctcttctattccgttatcatatttttggctacgcagatactttatctcggcagtaaagagctgtatggagaagaaggaagtatccatatcgaagtcctgttgccggcatttgtattgggtatgatcatgaagcataaagagcacgatactcctgtagaacgaaaagtctctaccggaatctccttcctgtttatgttcctggtaggtatgagtatgcctcattttatcggagttaactttgcggaaactcatgcgggcacgcattcggtgacaggttcgcaggagatgatgtcctggggaatgattttgttccatgttgtcatagtctctttcttatcgaatataggcaaactttgtccgatgttcttctatcgtgaccggaagttgagtgagcgactggccctttccattggtatgtttactcgtggtgaggtaggtgccggaattatatttattgcattggggtataatctcggcggtccggcactggtcatttccgtacttacattggtgttgaatcttattctgacaggaatatttgtcctttgggtgaaaaacttggctttaaggagctataatgattaaaaaaatccatatattgcggatcaaatactataaacacctttcattatgacaattttgcgtacaatgcgaaatttctcgtcaatgaatatcgcggcgagtatccttttgtttgtagcggcaatagcggctgctatcattgccaattctccggttgctccggtttatcaggagttccttttgcatgaacttcatttgcagatcggtaatttcaatctgctttcgcatggcggagagaatctgcggatgatcgagttcatcaatgacgggttgatgaccatctttttcttgctggtaggactggagatcaaacgggagttgctggttggtgagctttcttccttccgcaaggcggcgcttccctttattgctgcctgtggcggtatgctgtttccggtgattgtttatatgtcaatctgtcctccgggcagtgagggaagtcagggactggccattccaatggcaacggatattgctttttcgttaggggtattaagtctgttgggaagccgtgtgccgttgagcctgaagatatttctgacggcttttgcagtagttgatgatatcggaggtattcttgtaattgctcttttttatagttcgcatgtgtcgtatgggtatattctgatagccgcattgctttacgttttactttattttataggaaagcgtgggactaccaataagattttctttttagtgatcggtgtcgttatatggtatttatttttgcaatccggcattcatagtactatttcgggagttattctggcgtttgtcattccggcgaaaccccgtctggatgtcggaaaatatatcgagcatattcgtcatacaattgcaggtttcccggtggtggaatcgggaagtatcgtattgactaatgagcagattgctaaactgaaagaggtcgaatctgcttccgaccgtgttatcagtcctctgcagtctttggaggataatttgcatggagctgtcaattatctgattcttccgttgtttgcctttgtcaatgcaggcgttgtctttagtggtggcggtgagttggtgggaagtgtagggatggcagtggcagcagggttgctgtttggtaaatttgcgggaatttatttctttacctggttggctataaagataaaacttactccaatgccgccgggtatgacttggaagaatctttccggtatagccttgttgggagggatcggttttacggtgtcgcttttcatagccaatctttcttttggtgcaaactaccctgttctgttgaatcaggctaagttcggagtgctatcggggactattctttccgggttattaggatacattgtactcaggatagtgttacctgtccgaaagcagaaataattattagagatcagtcgttcaggcatatcggatattaatcagacgatatgccttttttttattgtatatataataaggtgaaaatgatatctactaataatattagttaaacaactgcttgatttagtagattaactagttgtattagttgtttgtttgaaaaatagtattatatttgtgacattggaagaacaataaatatgtagactatgaaacagatgaaacgattgaccgtcaaagaggaagaaattatgcgtatattttgggaacatggacctatgtttgttcgtgaacttttatcattctatgatgaaccaaaaccgcattataacacagtttctacccttgttcgagggctggaggagaaaggttttgtggggtataaagcctacggaaatacttatcaatattatgctcttgtttcggaaaaggagtataagagttcggcactcaaagaagtggtttcccagtattataataattcctatatcaatgttgtgtcttcttttattgaagaagaagggatgtctgttgatgaacttaaatcgttgatagagtatatagagcaaggtaaaaagaagaagtaatctttctgtggtttatcggacagatacgatttttattctatggacaacaacttttaatctgaaaacacaatgggagcctttttattctatctgctgaaatccggatgttgcttagtggtcttttatattttctttaagctgctgatgagccggagtacttttttccgtttcaaccgtatcactttgttagttgggttgttaggatgtactttgcttccacttatagagctgacaactaccgaggagacttttttgcatactccgttgtatgccattcacgaaatattgcaaagcacggagtctgtcattctaaatccggaacagatggaagatcctattcttatacctgaaaagaatccggaaataaggtctttgaattgggttcctgtgactttggcttatatatatggagtgggggctttggcgacatttatctggttatccatgtccacttgccgtttgattcagttgattcgtacgtcagagaaaaaacggtttggaaactatgtattagtgattcctcagcagccgactgcttcatttagctggggtaaatatattgttatttcagcagctgactactctcaacagtccgaagaaatactcctccacgaaacgatgcatttgcgaaaccatcatactttggacttattgtttatgcagatattcctgcttattcattggtttaatcctgtcgtttggctgctaaagcgggagttgcaggaaatacatgaatttgaagccgataatggcgtaattaatacaggcatcgatgcaactaaatatcaattattactggtgaaaaaagctgttggtacaaggctctactctatggccaatggctttaatcactctaaacttaaaaaacgtatcactatgatgttaaaagaaagaaccaatcgttgggcacgattaaagctgttgcttgctgtgcccgtgatggctggtgcgctttatgtgtttgcacagccggaagtgaaagaagttccgcgacagattcagtctgaacttcagcaaaaagaagcggatgattatgtgtctttaatgattttcttcaggaaggaagaagagaagtatagtaaactggtcaatggatcaaatccacctcctcgggtaaaagagaagcaggctcatggactttgggttaatgctcataataagatattatttgataatgaatattgttcggtagatgagttgaagtctattatagtgaagaatttgttgggatcttgggagaaaagcaacaggaaagatcctccggttattttcttgcagtatgatactgaaactgcatttgatgcactcactgctatactcaaagaagtaaaaggggcatttgaacaaattcgtgctgatttgtcagctgcatcgactgataaaagtgtagagtatctcgatcggttgtttccaattcttctaatagaaatgtctccgaaaagatatggattaaaagagttgccaatggagcataacttaaaagagccttcaatggaggaaaaaatcagtgggattgtggtaacacttcacacttcggaagggcaggaagtaatgaaagattttactttaacggaattgaagcagaaagtcactgctgcacgtgcaaagcaagctgatccggaaagtttggttattggcctcaagatagaaaaggggtgtaagatgggatacgtgacggatatcaagcaggtgctaagggaatgtagtgcattgaagattaattattcaactgataattaattagtttataaatagtgtcactatatagccggcatagtgacactatccaatcagcatagtgacaccatccaatcaatatggtgacactatcctaaccggatagcgacaccatcttaaaaggtctataatttttgttttattcgtcatccccgtcatccgctatcggcagaattttctgactttcttcatgcggtagttgctccacttggcgtagtttccgttcaatagcgcgggttctttttcccatcacttcttccagttggtcaccggcactttgcaggttcttctgtaccttttcgagtagtcctccgaatttgctgaattcggttttaactgctcccaaaacggtccacacttctccggtacgtttttgaatagccagcgtgcggaatcccatctgaaggctgttcaatatagcaccaagggtagtcggtcccgtcacaacaatcttatattctttttgtagcgtctctaccaagcttgttcttcggattacctctgcgtaaatactttcaaaaggcaggaacataatggcaaagtctgtggtgaaaggcgggtctacatatttatcgtgaatatctttcgccattttcttgatagtcgtttccagctgcttgccggatgattccatcaatgcagtatctcctgcttcgaaagcatcgtaatattgttcatatacatctttcgggaatttagcatcgataggcaggtatacagtgctgttcgcatcatccttacccggtaacttaatggcaaattccacaaattcagttccgcttttcttggtttttacattggcgtcatattgttccggactcatcatctgttccagcaatgctcctaactgaacttcaccgaatgtaccgcgcatttttacgttactcaatacttttttcagtccgccgacgtcttgtgcgagagatttcatttctcccagtcccttctgtacattttccagttgtgagcggacgatttcaaaggactgaccaatgcgttcattcagtgtcttctgcaatttctcttccaccattagtcgcatatcatccagtcgcttctcggtcgattttatcaagacctcttgctggcgtgccatcgtgtcgaacttctggcgttgcagttctccgttcgtcatcatgttcttatgcagtacgtcttgtagttgctgcatattctgatttagcgtttgggtcatttccatacgaagttcccggatactgcggtttagttcttcacggttctcttgcatttgctggcgcaagactgtctgcaattgttccgcttgcgcatgattatttccttttgccagtgatagtacaatcgagattactgctaatgcggcaataacaatgagtagaatcagctccatcaataagtcagaatttcgtttccggtttcagtaatcagaatcatattctcccattgggcagaaggcagtccgtcatctgtgcataccgtccatccgtcagcttcgtcaacgaatacttcataagtacccatatttatcatcggttcaatggtaaaggtcatgcccggaacgatcatcattcccgttccccgacgtccgaaatgttccacatccggtgcttcgtgaaactgcattcctacaccatgtccgcaaagatcgcgaaccacgctgaatccgttcttttctgcgtgttcctgaatggcggcgcctacatctcccaattgtttccaaggctgtgcggcggctatacctatttccatacactctttagtcacttgaaccagtttgtgcatttcgggacttacatcaccgatcataaacatacgggatgcgtcggagaaatatcctttgtaaatggtagaaacatctacattgatgatatctccgctttgcagtatctctgttttgctgggaataccgtggcataccacatcattgatactggtgcagacacttttaggaaatccttcgtagttgagaggagcggggatggcaccgtgttttgtagtgaagtcatataccatgacgtcgatttcttcggtagagatcccttcacggatatgctccgaaatataatccaacagggcagtgttgattttggcactctcacggattccttccagttgttcgggagtacgcagtactttgcgcggtgggagtttgtaaccttgttttctgtatttctgtattttcgcttctacttcagccgggtaattggagggagtaaaccggaatcccttgataaagttcttcattattataggatgttttttaatcgtactacaaaggtacgagaataaatggaaaatgaaatcgtttatcatgtgattccttttttaccattcataagaaatactgatctgaggcacccattcccatctcttttgtatggtgttatattgatattgtacgccggttttcaatttccagcctttacctacttttaaaacaatgtcgctgcctagtgtggttggtattgcttcagaagaaagtccgcgatatcttcgggtgtccagattttgttcaccatatatgttaagaaaccattttttagagagcttataatccatttgagtttggatatgaaaatggtttgaactttcactaaagttacttttactatgcagagtgaaatttttgtttattttgagccgtgaataagtgggtaagaaggtagaattagtctgtcgaaagatgttatgagtgtgaaaaggtaatttcagagatatgattgttgatttaagagtcggtaatgttggatcaaagtcaacaaaggattttgtatgatatagcatgttctgttctgtcttctttacgaattctttattgattctgatttcttgctcagaatttaatgtttgctgtagcctcaatgaatcttgtttgctccactcttgtcctgctacggataaagggagtaataatagacaaagagtacctaactgatatttgtaaacgtccatatagtgtgctagtatagtttattctatggacggtgaaaaagtgaaaatgctgctttgtgtaatgaataaataatggctattttacataatatgagaatacttttctttttttgtataggtgtatttataattttgaggttaaaagagaaccgcatagcttgagcaaatatgattccggatcattcaggcacacaatataattcagaagttttttttctttcatatcactatacaattttgcaaaaacttgatcttttcttaataagtctatagagacaaatgtcttaaatatgtatatacgttcttgacggctgataatatctccgtattttgttatcataatttcttttgagataggggacaatgtcttcgaatatatttgtttgcacttcttttctgagcattccaggactcatagttcttgttatcattctgtgatgtttgtatttaagataatcgttttgctttgaataccggttctatcttctgaatctccgattcaaatccgaaccaatagccatgtccttcttcgtcaataggaagaaaacataaccggaggttctcacgatatgagccatatataatttcccaattatcgggaggaacttggcgttttgtctttactttttcagcggggattttctttaacgacataccggcttctatccatgcaatactgacttgtgtcacgtaatcgggataatgattcttgcagaaattatagaggataagtccccttttttccagactcaaaggagtgtcgatgacatctgtctgtattagatggtcaagtaactcgtgcaggaaatgcggattatccaaaatgagggtacgagtcagacttcgccatgtaggtgtattatagaatccgtctaaaagacgggacagatagtgggcggtttgcaattcttctacggaaatttttttagtctgcaaaacttcgtagggagggagaggagagtattggatgcctaactcttccgcccttcttcgcatttccgtgccgggaagtaattttaatgattccagttgtatttcccctgcaccatattcggcaagtgtacgaacgtcttcaaatatttcggataggtgatagagaggaagaccggctattaagtcagcatgtgtctccatgttcttaagggaacaaagatatttcagaccttgaagggcatcagataattttccgatacgtcggcttttctctaatacgggttcacgaaggctttgaatacctgcttcgaggtgtagcaaaccattaggtaaaatagcgagttcttcttttaattcttcggagagaagtgccgggtgaatttccaaatggaaacagatgtccggggcatattcacggaagaggtgaagaagttctttggctcgcttattattatagttgaaagtgcggtcgagtacacgcacatttttgatgccatgctgatggataacattcagtcgttcgcggattgcctccaatgaaatggtgcgaaccggtttctcacctccgctgacgcagaaagcgcatgtgttgaagcatcctcgggtagtttccagttgtacgaaaggcttgctccaattaaaaaaacgacttttctccggtgagacgagctgagagaagttcatgacacgggcaataccgttgtcttgatattggtctgattcgtccagataacataatccggatatctgattccactcatttacagggtgattccatacttttaaccaaattgggaatacttcttctccttctccccgaaacactccgttgacaaatttgttctttcttaagaaggcttcgttatttcctaaaaactccggaccgccgagtacgatgcagcaatgaggtagcaaagctttagcacgtgaaacgatatgcaacagttgctcgtgattaaatagccagttggtagcagcaataatatccggttgatggtgatagatttggttgactaccattccggtattttcgttgatggttgccgatactgtacaccactcaatggtagtgtcatctgctatttgagcatgtaatgcaggcaatgccagcgatgagtgcgcataggagctatttaaatcaagccaaagaagtttcatgtgtaaattttactattagtgggacaaaggtacaaaaaacttgcatcttaaggcatatagtaaaataaaaacgctaattttgcaataataaacgcaataaactagaaaattatgaagaatttgaaaaaatacgtaggtgttctcatgttgctgactttattggtcggctttacttcgtgcgaagatgatgaaactatatttgatcacatagtagggcgtacatgggttggtgatttaggattttgggtagataatagtccggtggaaagtggaataacctttaagagtaatggttttggtgtagatgaacaatggtattatgattgggatagagtagcggctgttttagatgtccgctggtggattgaagatggagatttattcttggattatggtaatggctatcctttattaatattagcagatgtttatgttgaaggccgatatcttacagggcgtttgtattcaaataatatagatcaaggaaccgttactttagaaatgagtaattagtgaagatctaaaaaagaattgtggaattggaaaaaatatcgatttttttataaaagttccccttattgaaggctaatctatgtacagagttgtcagcaaataaggggaatttttattattttatttcttcaggaacaacttcttaaactctcccggataaggtgtctcaaactccattaaatctcccgtcaccggatgatagaaacaaagtttgaaggcgtggagtgccagtcttccgattgggttaagcgattcttcgcctccatatcttccgtcacctataataggatgtcctaaattctgcatatgtacacggatctgattcttacgtcctgtttccagatcaagttctaacagtgaataaccgttagcacgtttgattgtcttgtagtgtgtgatggattttgaaccaccatcatcataatcgctggagcttacataaagagttttatccgtcagccaggaaaccacagtgtcataatccttctccattgttccctcaacaacagctacataacggcggtcagtcactatttcataccagttgtcacgtaatgtccgttgtgttttttcgtcttttgcgaacatcattaatcctgatgtatccctgtccagacgatgtacgataaacacacggtgctgtctgcccgagcgctgtacatattcattcagaatcgtataagcggtgcgctctttttgtcgctcggtattgacagataagagtccttgcattttttccactacaatgatataagcgtcctcatatacaattttcagcagtctgttatgaaattccttctttcctttttccttgctgatttgtactttcattccgggttgcagcgggaagttgaactgagtggtgattacgttatctaccaataccacccgtttgctcagtaatgacttcagtttcgtgcggcttgcgtccggcattttggcagccagaaactccattagttccatgggctctttgactgcatagttcgtatattgggcacgtgctttttctgcaggagttcttctcggtcttttttccatttcttttttcttttgcgaacaattcaactaacgtattatcgaagctccagcaacactacattttccacatgatgcgtatgcgggaacatatctacaggttgcacagctttcactttatatttgccgtcaagcagttgtaagtcgcgtgcctgcgtagccgggttgcagcttacatacacaatccgcttcggttcggcaaacagaataacatcaaccacatcctgatgcatacctgcacgtggggggtcggtgataatcacatccggacgtccatgctgattgataaattcctgagtcagcatatctttcatatctccggcatagaacaaggcattcttaatctcattaatctcggcatttacctttgcgtcttcgatagcttccggtacatactcgataccaatcacctgacgggcctggcgggatacaaaattggcaatggttcccgttccggtatataggtcgtataccagttcctttccggtcagcccggcaaattcgcgggctatcttatataaattgtatgcctgttcggagttggtctgatagaatgatttcggaccgactttgaaacgcagtccttccatttcttcaaacatatggtcttttcccttgaatacatgtacatccagatcattgatcgtatcgttgcacttattattaataatgtataggagagaagtgatttcggggaatgaatcggcaatgaactgcagcagttgcttgaatagttccatttcatggtcttccgtaatcttgcagatgacaatgaccatcagctctcctgttgatgaagtgcggataatcatattccgtaacataccttcctgagtacgcagattgatgaaggagtaatcatgctcgtaagcataatcgcgtacagcattacgaatacgattggagatgtcgtcctgtaaccagcatttttcaatagccagcactttgtcgaaagctccgggaatatgaaaacctacagcattcatctgatcatacttcacatcctgccgaacttcatcgttcgtgagccagcgtttgttcgaaaaagtgaactccagtttattccggtagaactctgttttggcagaacccagaatcggtgaaatttccggaagttcgatcttcccgatgcgtctcagattgtcttctacttgtttctgcttatacctgatttgttccgaataggggagcacctgccatttacaaccgccgcatacgccgtagtgttggcagaaaggaacggcacgtacgggcgacagctcgtggaatttcacagcttcggcttcggcgtatttgttctttttgcgcttgatctgcaggtctacaacatcacctggcactacataaggaacaaaaatcaccaggtcgtttacttttgcgatggcttttccttcggcagccacatccgttattgttaccttctccagcaggggaagttcttttctctttcttgccacttttacaccaatctaataattatgatgcaaaagtaggtattttttttggaaaactttcgtgtctatgaaaatattccagattgtaatgtcgaaattgcattttaatagaaagttttttctcaaaaagttttctggtttgcgaaatatacttagatttgcgaacagaaaaaaatcataatgtaactttaaacacaatattatggataaaaaaagagtttatacctttggaaatggtcaggcagaaggaaaggccgacatgaagaatttgttaggtggtaaaggtgccaatcttgccgagatgaatttaattggaattcccgttcctcccggattcacaataactacagaagtttgtacggagtataatacgttgggacgtgataaagtggttgagttgctgaaagatgaagtagtaaaggccattgcccgtgtagaagaattgatgaaatctaaattcggtgatatcgaaaatccattgttggtttctgtacgttcaggtgcccgtgcgtctatgccgggtatgatggatactattctgaatctgggtctgaatgacgaggtggtggaaggtatcatccgcaagactggtaatgcccgttttgcatgggactcttatcgtcgttttgtacagatgtacggtgacgttgttctgggcatgaagccgacgaacaaggaagatatcgatccgttcgaagcaatcattgaagaagtaaaagaatcaaaaggagtaaagcttgataacgaactggaagtagcagacctgcaagagcttgtgaagaagttcaaggccgctgtgaaagaacagaccggaaaagatttcccgacttgtgcttacgaacaactttggggagctatctgtgccgtatttgattcatggatgaacgaacgtgctatcctttatcgtaagatggaaggtatacctgatgaatggggaacagctgtaaacgtacaggctatggtattcggtaatatgggtgacacttctgcaacaggagtttgcttctctcgtgatgccggtacaggtgaagaccttttcaacggtgaatacctgatcaacgcacaaggtgaagatgtggtagccggtatccgtactccacaacagattacgaaggttggttctcagcgctgggctgtactggcaggtgtgacagaagacattcgtgctgcaaaatttccttcaatggaagaagctatgccggaaatctataaggaactggatgcattgcagactaaattggagaaccactataaagatatgcaagacatggaattcaccgtgcaggaaggtaagttatggttcctgcagactcgtaacggtaaacgtaccggtgcggctatggtgaaaatcgcaatggacttgctccgtcagggcatgattgatgaaaagactgctttgatgcgtgtagaacctaacaaactggatgaacttcttcacccggtattcgataaatctgctttgaaacaggcgaaagtgctgactcgcggtcttccggcttctccgggtgctgcaaccggtcagattgtattcttcgctgatgatgccgccgaatggcatgctgccggaaagaaagtggtaatggtacgtatcgagacttctccggaagacttggccggtatggcagttgccgaaggtatcctgacagctcgtggtggtatgacttctcatgctgctgtggtagctcgtggtatgggtaaatgttgtgtatccggtgcaggagcattgaatatcgactataagactcgtacagtagaaattgacggcattgttttgaaagaaggcgattatatttctttgaacggtagtacaggcgaagtatataatggtaaggtagaaactcaggctgccgaactttccggagactttgccgatttgatgaaactctcggataaatatactcgtctgcaagtacgtaccaatgcggatactcctcacgatgcagaagtagcacgcaactttggtgcagtaggtatcggtctttgccgtacggaacatatgttcttcgaaggtgaaaagatcaaggcgatgcgtgaaatgattctggcagaaaatgcagaaggacgtcgtaaagcactcgctaagattcttccgtatcagcaagccgactttaagggtatctttaaagcaatggccggttgtccggtgactgttcgtctgctcgatcctcctttgcatgagtttgttcctcatgatacgaagggacagcaggaaatggctgatacgatgggtgtaagcctgcaatatatccagcaacgtgtagaatcgctgtgtgaacacaatccgatgttgggtcaccgcggttgccgtttgggaaatacatatcctgaaataactcagatgcagacacgtgctatcttgggtgctgctcttgaactgaagaaagaaggagtagagacacatcctgaaatcatggttccgttgaccggtattttatatgaattcaaggaacaagagaaggtgattcgtgaagaggctgccaagttgtttgaagaagtgggcgacagcattgatttcaaagtaggtactatgattgaaattcctcgtgcagctctgactgctgaccgtattgcttcatctgctgaattcttctcattcggaacgaatgacttgactcagatgaccttcggatattctcgtgacgatatcgcttccttccttccggtttatctggaaaagaagattctgaaagtagacccgttccaggtgctcgatcagaatggtgtaggtcagttggtacgtatggctacagaaaagggccgtgctatccgtccggatttgaaatgcggtatctgtggcgaacatggtggtgaaccgtcttcagtgaagttctgccatagagtaggtttgaattacgttagttgctctccgttccgggtacctatcgcaagattagcagcggcgcaggcagcaattgaaggatagaaagataaactggttagaaagttaactttctgataattgggctgtaatcgtctcgtgagagaatgattacagccttttttgttggatgatgttatttttaattgtatttgttcagccctgataatcagccattaataatgatttgtttggtgattattataaaaaactaactaaatatttgtttaagatgaagaagtagcttaattttgcccccgaaaacaaaacatgtttttattttataacttaaaaagaaagaagatgaaaaagggtttattattggtagttgtaatgttagcaactatcgctgtaaaagcacaggacatttacgtaggcggatcattgaacgtatggcgtaacagcacaggcaacactacttcttttaaagttgctccggaaatcggctacaattttaatgaaacatgggcattgggtgctgaactgaactattcacacgaatatgtgaaacaagtgactgcaaattcagttactgttgctccgtacatccgttggtcttactatcagaatgatgctgtacgtctgttcctggacggaactgctgctattggtttcgtgaaaatcaaagatggtgataccactaaagcaggtcagatcggtttgagaccgggtatcgctgttaaactgaacgatcatttctcttttatcgccaagtatggtttcttgggatatcgtaagaatgtgaacacttccggagattctttcggtctgatgttgactagcgaagatttgtctattggtttccactacaatttctaatcgggtagtagataataaaaaataggaaaggggattctctgaaatagggaattccctttctttgtgtgtaatctctatattttacacgtttgttaacgaaaaagttgtttgatatatatatcaatcatatatttgcattgttaattaaacagatgatttaactatagtattaattaaaactttagaattatgaaaaagagtgctttatttattttatttgcgctgatttcagttgctggcttttcacagattacaggttggaatgctaaggtaggaatgaacattagtaattatacaggtgatgctgatttgaatgcaaagattggctttaaacttggaggtggttttgaatatgcttttgataatacttggtcattacagccatcattgtttttgtcgactaaaggagcaaaaaaggatggtaatagcataaatgcaatgtatttggaattaccagttatggctgctgctcgttttaatgttgcggataatacaaatattgtggttaatgctggtccttatttggcatgtggtattgctggtaaaaccaaaattgatttggggaatgatacggaacgtaagtatgatacatttggtgatgatgctttaaaacgttttgatgccggtcttggtgttggagtagctttggaattaggtaaggttattgtaggattggatggtcaatttggtttagtagatgtagaaaaaataggtaatcctaaaaatacaaacttttctattgtattaggatataaattctgataagaaaattactaaaaagtaaaccgctgtaaaagattacttacagcggtttctttatttatgattgtatataatattcgaatcgatatttcttagtccgccaatttctttaactttttgaaatgctcgatcacagccagataattctgatccagacaggcatcaaatttattccagagatcccccagtacaacagcccctccaaatccgaaatcttttatttctagtagattatcttcattaatacctccaagtgccattacttttgagtcaatgatcttagctttctgtgcctcacgaagttcttctgccgtataagtagaatagtaattaaccttcgaaatactatcgtaaatgggactcatgaaaatgtaatcatagaaatgctttctgttcttcacctcttctacggaatggcaggaacaactgacgtgtccggcatagtcatgcggttcgctcggattgcgtgcattcaggtggatacccatcagattgaactcttctttcagataaaaatgttcgtgtgtcacaatgcggcgatgatatttttccggaatcagcgtcagtaatcgttcggaatacatggccggtgtctcaggttttctgagatgtagaatatccagtccctcctcgaaaagagcggtaatgatcttatcttcttcaacgaagaacgtgggcgtggtaactacaattagtttcatttcctgtgtaaagttgtaaagtttagcaaagttactaattaactatttcagaaaccaacgtttatagtgaaaatttgttagattgcaatgtgcgcaagtcaatagtccatagtttacctgataatacttcgccaaatccacagataatcttcagcacttccgttgcttcgatgcttcctgttaccgcaggagtaatgcccattacacctttggggggaggaggcattcgtctcatttcttcttcgtccggatataagtcccgataactttttttctcttctccgtaatggaaaacggatacctgaccttcaaagccgcagatggctccatagacatacactttccccatttccgcgcagatgtcgttgataagatagcgggtagagaagttgtcgcagccatctaccactatatcatactgactgataatttcctgtgcgttttcctctgttaaacgggttggataagtccggatagttatctcgcagttaagtgcggaaagtcgttcggcggcacatattgccttgggtttacctaattctttctctgaatagagcacttgccgttgcagattactgatgctgactacatcgtcgtctaccagtccaatgcagcctactcctgctccggtcagatagagggctatgggagagcctagccctcccacgcctacaattagaacctttgcttgtttcagtttctgctgaccgtcttctccgatttcgggaaggatcatttgcctgtcatatcgcattgttttatcttttaaagtcaaaagactggtcccaatccttccaaaccggttcacgtcctaatttctttaggtcacgttccacttctaccgctttccgttcgtcactcacatggaactgctccagtgtttgcgggtagctgtaatatccgcccggttctgtcttgctttcggcactcatggttgtcacgcccagtgttgccatgtgatttcgtatctcggcgctttcacgggtagaataggagatatctacatcatgatcgaagattcgcatggcgaaagtaagctgtgcaagttcccggtcgttcatgataacattgggttggaagccatcgttttcggatggacgcatacgggggaagttgacgctgtatttggtcttccagtagtgtttctgcaggtagcggaggtggtaagccatcattgtcacatctgtccgccattcctccagaccgatcaggacacccatgccgatcttatggacacccgcctgtcccatacgatcgaatccatcgacacgccattcgaatttggacttcatgcctcgcgggtgatactttttatagttcgccttattataagtttcctgaaagcagatgactccgttcagcccgtgatgggtgagttctttgtattcttccgctttgaggggcatcacttcaatctgaaggttactgaaataaggttttgccagatcgagagcacgggcgatgtaaggtacacctgctgctgccggattttcacctgtcacgagtaaaagattctcaaaaggagccagccgtttgattgctttgtattcgttgatgatttcctcctccgtcagaatcgttcttttcatcggattactgatatggaaaccgcaatagacgcaggagttggtgcatgaattggtgatatagagcggcacaaacatagagattgttttgccgaaccgctccatcgtatatttctggctgaggcgggccatcacttccagatagggagtggcggcaggtgagatcaatgccataaaatcgttgacatccagatgctcttttttgcctaatgcacggcgcacatcggcatctgatttggaatagatggcttttgtcgtctcttcccaggatattttttctaattcgtctgagaacattttaattaattgaaagttgaaaattaaaaagaaatgaggttgtgacttggtttggggatattcacaactcattatttatcactcttggcatttttcttcagatcacgggataatctcatggcgcagaaatttggtccgcacatcgtgcagtattctccgtcaatgtgatgtcccgcgcggaaatatccttgtgcccgttccggatcgagagacaagtcgaactgatctttccagcggaactcgtaacgggctttgctcaaggcattgtcgcgtacctgtgctcccggatgccctttggcaaggtcggcagcatgagcggcaatcttataagtgataacccctacacgtacgtcttctttatccggcagggcaagatgctctttcggagtgacataacaaagcatagctgtacctaaccagccgatttgagcagctccgatggcagaggtaatgtgatcgtagccaggagcgatatccgtcactaaagggccgagtgtataaaatggcgcatcatggcatttctcgatctgacgttccatgttctccttgattttatgcatcggtacgtgtcccggaccttcgataaatgcctgcacgttcttttcccatgcacgaagtaccagttctcccatcgtgtccagttctgcaaactgtgcttcgtcgttggcatcatggatagagcccggacgcagtccgtctcccaatgatacggcaacgtcgtattgagccagaatatcacagatatcgtcaaagtgttcatacaggaaactttcctgatcgtgcaccagacaccatttactcatgatgcttcctccacggctgacaatgccgcacagacgtttatcggcaagatgaacattatgacggcggatacctgcatgaatcgtaaaataatctactccctgttcgcattgttcgatcagtgtgtcccgatagatttcccagttaaggtcttccactacgccattcactttctcaagtgcctgatagataggcacagtgcctaccggtacagggcagttgcggatgatccattcacgtgtctcatgaatattttctcctgttgaaaggtccatcagcgtatcacctccccatttgcagctccataaagctttttccacttcctcgtcaatgctggaagtggtggcagagtttccgatattcgtattgattttcactaggaagttacggccgataatcatcggttcggcttccggatgattgatgttggcaggcagcactgcatgtccttctgctatttctttacggacaaattcgggagtaatgtgagtctcgattcccagttcctcacagttcatattttcgcggatcgccacatattccatttccggagtgatgattcctcgtttggcgtatgccatctgagtgatggcttctccctttttggcacgatagggaagggcaatgtgttcaaagcggagatgatccagacttttgtcatcacgtctcatttgtccgtattccgaagtgatttcggggagttgctctacgtcaccgcgtcccacaatccattcttcacgtaagcggggaagtcctttcttaagatcaatgctcattgacgggtcactgaacggaccgctggtgtcatatacatatacttccggattcggagtagctatcttttcttctccttcgaagctgacactgggcacttgttcaactttccgcatggctacacggatgttcggatagagtttacccggcagatacactttctgagaacgggggaattttattttttgttccatagaattttattatcatatcattaagaatagtgaaacaaacactactccctacttattacctattacttatcacctattacttattccaaaaatgcagttaaaggtgaacttgcttctgctataaagttatcagcctgcagacccagtcctgcttcgtatgcccgtcttccggcttcggtggcggctttgaaggccaacgccatttctaccggattgcctgctacggcgatagcggtatttaccagtacggcagaagcacccagttccattgcttcggcagcgtggctcggtgcaccgattccggcatctacgacaacggggataccggcctgttcgataataatctgcaggaattctttggtttgcagtcctttgttagttccgatgggagcacccagcggcattacggtagcggcaccggcttcttccagtcgtttgcagagcacagggtcggcctggcaatagggtaatacgataaagcccagtttaacaagctgttctgtagcctttagggtttcgatagagtcggggagcagatagcgcggatccggatggatttccagtttcagccagttggtaccaaaagcttcacgtgccatctgtgcggcgaaaacagcttcttccgcatcgcgtactcccgatgtgttgggtagcaactggatattcggatgaataatatgtttcagcatgtcgtcttctttgtcatccatgtcgatgcgcttcatggctacggttaccatttcagtgcccgatgccagaatggcttgttccattacttcattggaattgaattttcctgtacccagaaaaaggcgggagtcgaactcacggcctgcaattactaacttttccacttttcaataagtttatttgattatacgtttcatgttcaaaatctttcgtgtttccgctgccggatcctccgcccgaagaatcgttcctgaaagcgcgattccgttcactccggtttcgagtatggcgggtatatcctcacgggtgattcctccgatggctactaccggaagttcgatattcgcttccttcatctgagataaaatagcggtataaccttccagtcccagtacaggactcaggtttttctttgtagtggtaaaccggaaaggaccgatgccgaggtaatctgctccggcacggtagtgctgtacgacatcttcgaatgtatttgccgtacctccgataataaatgcttctccaagtaattgtcgtgcctgatctatcggcatgtcttttttgcccagatgcactccgtccacttccagctttttggcaagttcgacgtggtcatccagaagtaagatcgcttctttttctttgcagagcggctttagttggagggcaacagcttccacctcttcacacggagcttccttcatgcgtagctgaatccacttacatcctccttcaagtgccatgagtgccgattcgaaataagtataccgatcggtctggtgggtgataaattgtagactgaccatacttttaccctccacaagccgctttgatgaccacgaggttatcattctcctgtaacgcgaatttctcccattcggaacgtggaatcattttgttgtttacggcaatagcgatgccttgtaccggaagttccagttgggcagccagttgtgtaagggtagaagcaggagtcatttccacctctttgttgttaacttgtactttcattgtcctatcagtattaataagttgaaagtaaatacaaagagcgtgcttatatagaaaggcgataagaaagaaacacaatccctacgtcagtgctaactgcctcaggttcctagggtataatctcagcccctctttgggggcacccctttgtctttacgggagcaaagtaagcgaaaaagaaacaaagattcatcaaattatccgtttttttttcatttttcttccgattcccgctttttgatgggatgagaaaagacaaaccgtgctccgttcttataattcttgtcaatccagatatcgcctcccatgcgttgtatggtcagtttgcaaatcgccagtcccaagcctgttccctgcacaaattcgttgagcttctcaaaacgctggaataccagttcctgcttgtcttcggggatgcccgcgcctgtatcggtcacagagaacagcatacactggtcttcttcgtctatttcataatccagcgtgatacttccgccgtcgggagtaaacttcagggcattgttcagtaagttgatgatcacctgctgcaaacgtagcggatcggtatagagcatataaggctctttcggcatctgaagcctgacatctatatctcttgtccggttctttctggtcagtgtgatcatgttctggcaatgatttaccagttcgcaccattcatacttgaacagcagtttgcctgattccaagcgtgatacatccagtacatcactgatcagttgcaataacaattcggaattagtctggatgatatccgcatattccttctgctcgtccgttgtttccacggtatcgatcagcaggctggaaaagccgacaatggcgttcagcggtgtccgtatttcgtggctcatatttgatacgaaggcacttttcagttgattggcttcttcggcacgctctttggcatgacgtagtgcaatttccgataattccagtttctttttatcttcccttagttgggctgtagtcttctcaaggtgattctttaagatttttgtccggtaataataatacagtgagataaacagtccgcctatcagtacaaggaaggtaaacaggatgaattgcacttccgtccgatatgcctgaaagaaaggcacctgttggttgatgataagtgaattgaaaggtagtttcttgtcctgaaatccccattcatgcagtttgttggcatcaaatttgtatctgttgggcaacaaatgaatgtggctgacattgtttttccccttgtccagaaattgataagcctgttctcccatgcttctccctattccgtcgtactgggggatataccctccgattgcccaataaccgatggcagtagcagtcaggctgaaaacaggcaactctggattcgctttggagaaagcatatacagagttgttcatatacgttatgccccgattgtcaattctccagatacccagtagtgcaaccgaattttgggggatatcgcgtagttgtttgacggcagcatcaagggtgtggatacggccgtcaatataggtcgtcgatatttccggatagcgtttcatattctttttcacccacgcttgttcggcaagtccgttgtaggtgttgtccgagatgaacactaaatgtttcatatccggataaaagcttcgcatcatttctatgtccttgtcgatatcatattcatatgtgttacagtatattatattgtatttattcattctttccgttaagtcgatgctctgaggttcgtaggtctgtatatcaatagagtcttccggaatacggatgccgttgcgcgatgccatagcgcaaaatacgggcagttgtctgtacttctcgtcttcaaggtgcaggaaactgctccacgcttcgccacccagcaggatgaccagcttggcgttcggatgtttgtccagaatgttggtaagtctttttttccattttctggattgattgaggtcggtaacattcatgttttctacgatggtggaatacttgccacccagttggcggtacgtttctacgaacgtgttgatattatcgtaggtatatttagtatcggaattataggacgtcacgaaaagtatctcctcttccaattcttccggggtagccgcgttactgatgaaagagagcaaaaggaagaaggcaacaaagaaaatgcgccattctttatttttttgttgaagtgtcataattgtctgttttgattttcggctattgcaaaaatacaatttatgcctttgaaatacaatagaaagcttagtttttttgttgtagaaaaaaggccgctgtgaaatccacaacgaccttttcaatagtatagtttagcttaattttaatgagtccggttacattcgtttttctaccacatcccagtcgatgatgttccacagggcgtttacgtggtcggcacggcggttctggtagtccagatagtaggagtgttcccacacgtcaaaacccagaagtggtttcagtccggcgcgtacggggttactgccgtttccttctttggtgatatgcagtttaccgtccttgtctactgacagccaagcccatcctgaaccgaacaatccgactgctgctgcattgaactccttcttgaagttttcaaagctgccgaaatcacgtttgatggcttctcccagtttgcctgccggttcctttttcgaaggtttcggagcgaattggaggaaatataaattgtgattcaacacttggccggcgttgttgaagatagctccatcgggagcggtggcaacgatttcttctaccgttttgccttcatattctgttccgggcacaaggctattcagattatttacatatgtttgcagatgttttccgtaatggaaatctatcgtttgctgactgattacaggttccagcgcattgtttgcgtaaggaagtttaggcatttcgtaagtcatggtcataattattaaagacattaatatagtattcatattgtcaaaactttaaatggttttgttatactataataacagccatagttcgcaaaaggttcacggtattttatttttatttataaatgtactgtatacgttccacttgctgcgggttgtcatagctggtgcggcatatccattgccccgtattgtcatattcgtaataggagtcaccatcgatccggttcccgtactcgtcgtacaggcaggtcaggcagccggacgtcttctggctgttgccgaagatacgttggtagacgatgcgggtgaggtatccgtatttatcatattcatacaattctttttgcgagagaatctggttgggcgaattgacaaagagcatattctgatgctgagattcggtcattctgcctttgtcgtcgtatttgttgactgtatatccctccatttccccgttcttgttgtactctttggtttccgtcagtaatccctgcttgttgtagctgctgacggtatatctgccgtccatgtattttagggaatcgctttcgatgcttccgtcgataccgatgcggcgtgcacggcggtagaagtccgttttggttttcggattagtcttcacttcgaagatgcagtggccttgcgggtcgtacagcctgctggtttgcacctcgttgatgggttgcccgttcttttcagtcacggataatgtggtggtaagctgccccttgtcattgtaggtgtagctggtcgtaatattgccggtgctgtcggtctcgcagcactttatcaatcgtccttgagtgtaatattttacagtagtcggggtggaaacgatggcttgcaggataaatggagcacgcaaattctttgcctggtcacgaaattccttatacttgtgtgttttgaggaattcctgcaataaaccgagcgattcggagttgactattgccggtttcagaagctcgaagtctgccttttcactgagatattcaagatcgttcaggtgagtccgtgcaccggtggacagataaggtgtgttcttataatcatcgataatctgccggatggcggtggcatttccttcttttttcaggctgtcgatacgttggaacaggaaatcatcgtataaggtacggacctcggcaagataggggcgcggacctctgtcttgataatacttctgcatttcggggtcttcaaagaaggctttgaagtttgcaggagtcggggccgtcttcaccagttggtagagccgtacgttttcggaggcgttgacttgtgcgataaatttgccgttgggatactccttgacgtaagtctggtaaatgatgggagtgggggctttgagcattccttccagcagtgccacctcgcggatgttctgcagccgttgcagcatggcggagtcaaccggatattcggtggcgtgaatgctgtccagcagtgcccggctgaaaggtattttatcttttgaggcctccagcaggttgataatggactggtccgccttgtcccgtatctgagaaagcggaatcttttccccttcgcagatgccggggaagttactttgggcggctttctcgtagcagccgaagtagagggtggctgcctgttcgctctgttcgttccacaggtcgttgaggacgtccatcaatgataaatcttcggcatagtacgcctttgtttcgtcatccagtttttccctgttcttctgccatttgtcggcgtcattgtcgttcagataccttagcagcttttccatgcggctttgcttttgtgccattgcttgctgtggtatgcaggcgatgaggcacaaacataaaataaatgataaaaatatactctttttcattgctttgagtggttaggttaaatagttagtgatgaaaaatcataaaaatatcttcattgtcaaatgaatgttatacttttgtcgtattgaaacaaatttgaacgccaagggtttgttaaaaatcctcattgtttttataatgctgttatgaataccaactatatagaggaattaaatgagagtcagtgtgcagcagtgacttataacgacgggccttcgctggtgatagccggtgcaggttcgggaaagacacgtgtgttgacttataaaattgcctatctgctggaaaacggctatcaaccgtggaacatcctcgcactgacctttaccaataaggcggcgcgtgagatgaaagaacgtatagcccgtcaggtgggcatggagcgggcacgttatttgtggatgggtaccttccattccgtcttttcccgcattctccgtgccgaagcaaagtatatcggattcacttcccaatttaccatttatgattcggcggatagtaaaagtctgatccgttccatcatcaaggagatgggactggacgaaaagacatataagccggggatggtgcaggcccgcatttcaagtgccaaaaaccatttggtttctcctacgggatatgctgccaacaaagaagcgtatgaaggagatatggcagccaaagtgcccgctgtccgtgaaatatatacccgttactgggaaagatgccgtcaggcgggagctatggatttcgatgatctgctggtgtatacgtatattctgttccgcgactttccggaagtgctggcccgttatagggagcagttccgttatgtgctggtggacgagtatcaggatacgaattatgcccagcatagcatcgtacttcagctgacgaaagaaaatcagcgtgtttgtgtggtaggcgatgatgcgcagagtatctactcttttcgtggagcggatattgataatatcctttatttcacgaaggtttatcctaacacgaaagtctttaaactggagcagaattatcgttctacgcaaaccatcgtctgtgctgccaacagtctgatcgaaaagaatgaacgtcagattcggaaagaagtattctctgaaaaagaacgaggcgaaccgattggcgtgtttcaggcttacagcgatgtggaagaaggggatatcgtagccaataagatagctgaactgcgtcgggaacatagttacggctatgccgattttgccatattataccgtacgaatgcgcagagccgtgttttcgaggaggctcttcggaaacgaagtatgccctataagatctatggcggactttcattctaccagcgtaaggagattaaggacgtcattgcttacttccgcttggtagtgaacccgaatgatgaagaagcattcaagcgaatcattaattatcctgcccgtggcatcggtgatacgacagttggaaaaatcatctccgctgccactgaaaatggtgtcagcctttgggcggcgctttgcgaaccattgagctatgggctgaatatcaataaaggtacgcacaccaaactgcaaggtttccgtgaactgatagaaggctttatgaccgatcaggtggacaagagtgcgtatgagataggaacggatattatccgccggtccggcatcatcaatgatgtctgtcaggatacttcgccggagaatctgagtcgtaaggaaaacattgaggaattggtgaatggtatgaatgatttctgcgcgttgcggcaggaagaaggcaacccgaatatttctctgacagatttcctttcggagattgccttgcttactgatcaggactcggacaaagcggatgatggagaaaagataacgttgatgaccgttcattcggccaaggggctggagttcaaaaacgtattcgtagtggggctggaagaaaaccttttccctagtggtatggtgggcgattctccccgtgctctggaagaggagcgccgtttgttctacgtggccattacccgtgccgaagaacattgttatatttcttttgccaagacccgtttccgttatggaaagatggagtttggaagtcccagccgtttcttgcgggatatcgatgtgaattatttgcggttgccgcatgaggcgggagtcagtcggtcggtagacgaaggtgcggggcgtttccgcagggagatcgaaggtggatttacacgtgcggcatctcctacacgaacgccttatggtactaaattttccgatcgtgaacgtccgaagactcaggtgattgcacccagtgtgccgaagaatttgaagaaggtcagtgcggtgagtggaagcagtacacggtcggcttcagccggttcggcatctgtaacaggagtacaggcggggcagatgatagaacacgaacgtttcggtttgggcgaagtgatcagggtagaaggaacgggtgataatgcaaaagcaacgattcattttaaaaatgcaggggacaagcaactattgttgcgttttgcacgttttaaggtgatagagtaatcatagtaaaattagagatgatcatgaggaaacaactaactgtaattctgctttctgctctgatgttgagcggatgtgcatcgggacgtatgggaaatcccggagcaattgtaggtggtgctgcaattgggggaagtctgggaagttcgataggcggacttatcggagataataatcgtggctggaggggcggatatcgcggctctgccattggaaatattgttggcaccattgccggtgcagcgatagggaatgcgctgactgctccgaaaccggacccgatagaggaatatgcttacgttccggaagtcagacaagggcagtctcactctaagtttaaacctcggacgcagactcagcagcaactgactcagttgaaactgcgcaagattcgctttattgacgataaccgtaatcatgcgatagacgggggagaaagcagcaagatcatctttgaaatcatgaatgaaggacgaaatccggtttatgacgtggttcctattgtagagacggtcgggaaagtgaaacatatcggcatttctcctactgtaatgatagaagaaattcttccgggtgagggtatccgctatacggctacggtctatgccggaagtaagctgaaagatggtgaagtgactttccgcgtagcggtgtccgatgagaatggagtaatctgtgattctcaggagtttacgctgcctacgcagcgggcggaataggacaagaatagctcaaaatattcgatttgttatagtgacagtatgtgctcgggatagtgacactatccttggcacatactgtcactatgttaatgggatggtgacactatcccaatacaatagtccggtgcagtcattacacaataaaatgaagtatcggtttcatctacacagaagcattctatatgagtatctgtcaaaattttacgtatcggttttccttcccagtcgaaaacccaaatctcgctgtttagagtttctttttgttcttcgtgcatccgattggtgtttgggttatacagtacataaacatagttattggaaacggcaatgcctcgtgctcccagttcggcatcaggattatcactttccgcatacacaccgtctgggcttgaattgaactgataatgatagggtgctaacaatagtcttttatggagcgttaatgtttccggcttatagtcccatagctcaagtacattactggtagcacatgccagacgtttccggtcggtgttgtaaccgaattgtgattgatgaaacatacctttagccgtattgggtatggtttcttctccactttgatagttcgggaagtcgccagatttggatataacattgccgtcattatctaaaataaggaatctgcaatcttcaaaaacgccggacgctataaagcgtgattcgctcatcggatagactctgtcaatgctcatgggcaggtgtatcaattctccttgtcgccggatggaaaagtctttcgcgttgaatgtatagttttgcgctgtgaagtgccatcgattgtgtatgaaagcagacgaatcagacagaaagaattcgacagggcttaaaaattcatcaggtccttgtccttgtggtagcatttgatttacaaagcgttgttcactaagactatagcagtataaaaggctgtctcctttaaaatcaccggcatataagatatctcctttcttttttatatccattggaatggagataaaggcttccttcaaagcggtagatttagcagttgtgctttcgctaaaggatactcttttctgtgattcactacaactgaacaatggcaatgccaaagtaaataatagaatgatgtttttagatttcattttgttttgctttattttgtactataactacaaagataacgtatgtgttttgaaaaacaaggatattgaagagaaatagggctaaaatatttatagtgagaacataataatataattggtattcggtaattaccatatattgtgttaactttgtgatttatttgatggtaattgtagttgcgtttttgctaaagggtatatttattgccataaatagtattgatccacataccaaagaacttgtcggtaaccgaatatactttattgatttctgtaataatgtctttttcaagcagttttttagttgcggactgtacagaacttgcggatgtcagactgtatcgtttgataaatttcgctgatgtgacgttttctgcttcacctactttggcaatggcataaagcaattccttttgcttttcgggaatattagataagatttcccgaaagattgtatcattatatgcaataaggttatctatagctgttttgataatttccagtgtacattctttccctttcggtgtatctgcaaaagcttcattgaatgttttttgaatataaaaggtatgtcctttgaatagccgatatactttttctatattttcgatttcaatatgccgttttcttttttggaaatggtctgcgataaatggtatatagatttccggtgcaatggctttcagttccaaaatatcggcactgtggtagaatggacgggatgaagatagaaacatttcctgcatcatgtgccgttcacttccggcaaagatgaagttgctgttttctattttctgtatgtgtgtgcgtagtaatgcttctatattcttctcgggatatttagcaatttgttgaaactcgtcgatggcaacaatacaaggtttgtctgctgctatcaggcattgaaatatttcttccagtgtatattcgggtcgatcaatatcccccagttccagattgaaagtaggtagattggtcagcgggtcaaatccgaatttaccattgattgatttaagtgtctggataaacaggctcgccattttcttactgcggggcaatagtgtttcataaatttctttgccaagcagataagtgaattctcttaagcttgatgtatggagtatgtcaatgaagaaagtataatattcttcttttatttcaggtttctcataacagaaacggattagtcccgttttacccattcttctgggtgagataatgacaaggttattgccattggttaatgatttaaccagcctctctgattctttcacgcgatcgcagaagtactcgggttctatttttccagttactataaatgggttaatttcttttgccatacctgtttcaattttccgtaaaggtagttatttgaatagaattatgcaaatcgaataatgttaataaagtatctagtcttgttttatgcttattggatattgaatattgttaacaaacttattttttttgctttaatatggtccgtttctttaaaaccaaaggcccgttggttttaaagaaacgggtcgttggttttaaaggaacgcccttttggttttaaaggaaaaatggcgatttgtatattattgataatcagtagcttgataaatcctgttttcagtcttattaaatagtaaaatatttatataagtatagcttaataaataagagttttgatgctacaaacatttatattatgaatatttgtctgactacaaagtggcttttcttctattaagttatatctttttttaaagagaaagtttagattgttgtgaaaaatgttatctttgtagtacaaaacaacataaagtaaagcaaaatgagacctaaaatcataattctgttatctgctatagcttgtattggaggaattgtattcttccttgcatgcaaatatacttatgaattcaaagtaacggagcttaaggagaaagcgaaagagacttttactgaagcactggataaagagttgaaaaatagaaatataaacggaggactgtcattttactttaattctgaatcggctatctctactgaaatgcctgattcagtttattgggaagatgcgtcaggaagacatttatatcggatggattccaagaaaaactctatgaatattactcataatagtaatttacgtgctttgcatacttttattttttatgaaaagccacttcagcctgactctttaaatcttatatgggatgaacaattaaataaagcagatatttatatagaatcagctttacgtatttctttgacgcatgaagacggtagtgtagaatctcaaaagacctatcagagtgaatggggcaattcttcaaatttagtttttactttttatataggttatgcctgtgagatagaagtaatgggttatttgcattacactctatgggggatgatatataaagaggtgctgctatatttattgctatatataattgttggatatggattttatacgtttttcataattctcagtcgcaggatcaattcattacgtagtaaagaaatagtcgagattatcaaggagactcccgtggaaatcttaaaagaggttcctgtggaaattatcaaagaagttcaggttgaaaaacaaataattaaagaagtacagagagtggatattattcccttacattcttacatattgggtgagagtctaatattctatgcagatcagaatatcatagaggtaaatgatgttaagtataatattcaggggcagtccagtttacttttagaactattttttcaagaaaaagataatggctatacattaaaggaagattttattatagaaaaattgtggcctgataattcaggtaatgatgagcgaatgcataaagcgattggacgtctgcgctcgtttcttagaaaaatagatccttcattgagtataataaataaaaatggtacttatcgactaattatatcagagaaatctcttgttaagagaaatagctaaaaatgtcgatgaaatggagctattttgaatttcaacttgatttcttcggataaaaatgatgcgaggtcaggattggtcagcggtattctttgctaattaagtgcttcattactacttttgctctcagaattaatctttaacgcaaaagtagtatgaaaaaaaatcttcttcttttattatgtatagtagctattttatctactaaatatttggcttctcatgaaaagagacaaagtgctttattgttatataacatagaagctttagctgctaacagtgagcatgcagatattggacattgttatggaacaggtactttagattgtcctgtatctcacgataaagttaaatatatcgctggaggatatagtcttgaaggtctttattagctttcttcttctctttatctgcatctcttgtggtacaaaaaatatggaatatgcagagaatgtatttccttattctgaatttccacaagagaaggagctaaaaggagaggtgatagagcttgatactgccttatttcgctgtccatttcggatacgagtagaaggagataaagctattgtaatggatttgcatggtatcgattattatgctcatttgttcaaatatcctggctttcaatatttatcttcttttgggaggcgcggtgattcaccaactgaaatgctatcaatggataatgttcgtttttacaatcataaagtatggacattagatgctaataaaagagaattaacacggttgggtttttcttcatccggtgattcactgctccgtgacgaagcggtgatattggatgaagatattttaagaccacttgactttgccatatataatgatactacctttataattcctgattattccggtgaaaaccgattatgttggcttaatgatgatggggaacttgtaaaaaagataggcgctatcccatcaattaataatcaaacgttacgaaaagctcgtccagcattggcacaggcatggcgtagtttcattgattataattctcataacggtgtattagcaatggtgactcaactaggtgaagtacttgaagtctataatttgaaggatagcacggaggttattcgtattggtgaaaacggggaacctaagtttaaaatatttgaaggatatggaataccttcaggaattatgggctttagcgatgtgcaagtaacagataatgccatttatgcagtgttccatgggactacatttaaagagattgtaaaacataatggtcatcttccagatggaggaaagtatatttatgtattcagtttgaaaggagaaccactatataagtatgtgcttgatcactatgtatatggtttttgggtggatgaagctacaaaaacaattatagcgacagatataaataatgatcagcctattgtgagatttcaatgtggttgaaaaaatagatagttaacgtgattaaaagaggagcaggaagatgggttagtcaattttgccggattggttcccatcatctgctactttattcctactaaaaagaaaggaggtgcgacaaagatagtgataataatggttatggcaaatacgtttttaccagatatagagaaaagtatgaaatgaaaaggtataaatattaaaaaatctacttaaatgaaaaagaaattaatgggcatagttactattattgcaattgctgctgttgcaggatataatgtatatgcttcgcggagtaacgtgaagttgtcggacttagctttagctaatgtagaagcattggctgattcttctgaaggttctcaaagtgattgtaacacatactgtatggtgagttattttgatacatgtatcattagatatacaaataacacttttactacttgttatgatagtagaataagaagatctaactaaccgattgtaaggctatataggtgcctactatttctatatagccttgctttaaaaaatgtaatcatgaatacccataattcttgtttaatactgcttttgacagtattattagtaacagtatcttgtgcagaaaaaagtggaagtaaatatcaagatgcaactttaattgaatatcaagattttgtatccagtcaaaaattgacagggataaattttttatcagataaagaagtattaaagccgatgcgtatatatgtttgtgacactattctgataacaatgaaccctatggagaagaagctgtttcatctttttagtttaaaatctaaaaaagaaataggaaaacgaatttcgcttggacaagggcctgacgaaatgattcgtccttctattataaaatttaatgagaatcagattctaatatttgatgttgccacttttacgttatttacgtatgataccgaggattttatttcaaatgaaaatacgattcctttagaaaggaagactatagagctacaagcatatggtgaaataggtttactctctgataatctaataggatcgacatataatcctaaaaatcaatttataaaatttgataataatggaaagaaggttggtgaatttggctattatccagtggtggcagacttatcatatacagacgatgagaaattggaggcttttaaatcttcttttgtgactaatatgaaagataggatagccgtttgttataaatggacagatttgattgatatctatgatcagaacggtcaattgaagaaacggattcatggacctgaacattcgtatgcacattttaaggaatttcgtaatggtaatgctattgcagctacctctgataaagataatatagatgcatatttctttccatataatgtaggagatgagttttttgtgttattcaatggaaagccttgggatccggatgataaagaagtagaattgccagatcgtatattcgtttttgattggaatggcattcctcagaaaatatatactttagatcaaggaataattaattttgctgttgataaagttcagaaaaagatatatggaattagcagttcaccagaatttcatgtggtggaattttcatataaataatagataaacgatgaaaaatatatgtcttatgttattgccattattcttgatgtcatgtttaaataaggataataacatcgtttctcttttgaaagaatgggaacagaaagaaattctgttccctaaagaaatgtattttacaacaatgttgagggatactacatattataatcttcagagtgagtataaaattttagcatatgttgattcgataggatgtactagttgtaaacttcaattgtcggcgtggagtatgttaattaatgaaattgattccttatatgcaggtcgggtcaagtttatatttgcattctctcctaatagaattaaagatatttatcatgctatattgactgctaattttacatatccagtatatgtggataaacaggatagcattgctaaacttaatagatttccattagaatcaaacctccacacatttttattggataaaaataatagagttattgctgttggtaatccagtttataatcctaaaataaaaaaactttatttcaatattatttctggtaagaaaccttttttaccgtgtaatgcagaacaaagaacaaatgctagtttggataaacgatttttagacatgggcagttttaattggaaacaggagcaaatatctgacattatattaagtaattcaggagaagaattattagcgatagaggatgtttctgtttcttgtggttgtattactgtggaatatctaaaagaaccgattcgaccaggtcagaaattaaatctgagaataaagtataaagcagagcatcctgagcattttgataaaacggtaattatatattgtaatgcagaaggttccccatttagactaaagataagtggaaatgcaaaataaagagggaatatggcaaagtgctttagggatttatcatatatatgtataatattatttattgttttgggatggcatattatggataacattgtatctgaaaaagaggtagatattacttctttagaagttgctttgcggtctgctggtgataatagaggggagctggaaaaagtcctttgttactataaaagaaaaaatacagatagcctgaaatataaagcagcctgttatttaattgaaaatatgccctttcatagatattcagttggagaacaattagaaaactataagtcatactatgcatggctgaaaaaaagcaagggaaaagaaccgcaacaagttgcagattcagttaagaaagtatatggtccaatgaaagaacccaataagatacgcgatattatggaaattgattctgcttatttgtgtcataatattgattgggcatttaaagtttggcaggaacagccttggggaaagagtatatcattcgatgtgttttgtgagtatttgttgccttatcgtattggcgatgaacccttggtatattggcgtgaaatgtactatgcaaaatataattcattgttagatacattgagaatgtcggattctttggatatagaagatccagtagtagctgctaattacttaataaataaattgcctgataagtggcattattatacttcaacaactccttattcctttgggcatatcggacctgaatatgtacaatacttgtcaggaacgtgtcgtgaagtgactgattttgctgtatatctatttcgggcattgggaattccttgtgctattgattttgttcctgtacgtagctatgttaatgctgggcatttttggttggtagcctgggataaaacaggtgaagcgtatatggctaattttcccgagaatctgggaatggtccgcaaaaattggtggtatcgttgggatgatagtccaaaggtgtatagatatacttttgatataaacaaagaattatatgagcaaatggcgaaatataatgaaaaggtatattcattttggagtctgccgaaatttatggatgttacttatgaatatgcttattcttttgaaaaggaattagtcattccattggaaaaactttataggaatcaatgtagtgggagaatagcttatttatgtgttactaatagagataactggataccggttgattggactgaatttgacgcacagcatctggcttttcgaaatgtacgaagaggtacgcttatgagggtggctacttacgagaatggtactttgaactttttgactgatcctttttatgtggataaacagaaaaaggagcagcattatttctctattgaaggaaatacacaagatgtggtattgtatgctaaatgtaatatagagggagaaaatatgttccgtgaccgaatgatagggggcgtttttgaaggcagtaaccaactggattttgcagtaagcgataccttgtttatcatacagtgtaaacctgatcgtttgaatacgacagtaagaagttcttcaaataaagaatatcgttatatcagatatgtaggtcctcccggaggattatgtaatgtggctgaagtcgcattttatgaaaaaaatgatactcttccattgtctgggaaaattatagggactcccggatgctatcaacatgacgggacgcatgaatatacaaatgtgtttgatggaaaaacgtggacttcttttgattattttaaattttccggaggatgggcaggacttgatttgggtagaaaggtgcagatagaccgtattgtatatactccgcgcaacagggataattatattcgtcctggtgatatctacgagttgtattattgtgatcgatattggaaatccgccggaagaattaaatctacagttgattcattagtatacagagggattccccagaatgtacttttgttcttacgtaaccatacgcgcggcgtagatgagagagtctttgtttatgaaaaaggagagcaactatggaaataagacttaaaattaaactagttgtgttgtggaagacaatcatcttattaggaataattgtcttgctatctgcttgtttccattcgaagaaggaggctgtatcttctattgctattattcctgatgagcatacgttactggcgattacgccggaattctctataaaaatggcaggaaatacattgaataaacattatctacgattgaagtctggaaagatatttccaatgacagggattttgcaggtagatggtaggacctatcgttttatgggggaagattctttacgtatatcccctatagcttctcttgcaaatgacagcgtcagttggtcagggaaatattcttatttgtttccaggaaaagggtgggagcaaaaggaatatgatgattctttttggaaagaaggaaatgcagcttttggacctgtaaaaggaaattctaagattcgtaccgcttggggggcggaaaatatatatgtccgcaggcatattaagattgataataaagatgctttggaagggcataaaatttacgtctgttatatttgcgatgatcagataaaacttttttggaatggagattttttatttgaaaaaggaataacatatcaaacgaaatgtggacgtttaacagatgaagctattgctcatattggtaatggaacaaatgttttggcagcttatggatgtaatacaggaggccctgcgttgttagattttggtctgtatattgaaaataaaacttatagtgaagcagatacggccctattgaagcaaatagatgtacaagctactcaaactcattatgtatttcaatgtggggatgtagaacttcagattgattttgtttcaccttctttgtcagagaagtggaatatgacaggatggcctgtcggtttcctttcctatcaagttcgttcagaagataaaaaggagcatacggtggaaattttgttcgatgtggatatggaatggatgtttggtaggaggaagattgatagttgggttgaacaagagtggcggtttgtcaagtctgatagtttatatttaggtctgacggcggatggaacatcgttttcatgcgatgatagtcatgttgttctgtctcaaaagttgtgtgcagaaaatggaaataaaggcatattgttaataggatacggagaagggcagaggatacaatatattggtgagcgtttacaacctctttggaatgacaatggaaaaggagaggttaaagaattaatgaaggctgttggaaacaggtatcagaaacttaaggaagaatgtaataaattggataatctgtggaataataaagcatttcaagtgggtgataagacatttgcagaacagattcttccttcatatcgtaattttatttcttcccataggtttgtgttatcttcggataataagtcattctgcttcggagatactttgggtaatgttagagatgcttataggagttttcctgctttgttattttttaatcgtgttgattggatgaaaagtttattaaatccaatatttgaatattgtgaagatgaacattggaaaagaaaatatccgccttacgatattggattatatccggttgcaagcaaacaaataaaagtggataattgtgctgaagaggctgctgcaaatatgttggtgatgacggttgctattgtggaggcagaacaagatttcagttatgctgaattgcattggagtcatttgtgtttgtgggcaaattatctggaagaaaagatgaaaggtgaagttcttccttctattgagttattagatgcaaatgacaaacgtgtgaaatgtgtgctgggattgatggcttatcataaattgattcaactaaaggatgcatatgaataaagtgaagaaatttctagcaataatagagaatttaatattcatgatattctgcatgatagtaattttgttcttggtacagttattctgtttcacatcgtttaaaattccatcagattctatgggacctgcattaaaagatggagatagaatattggttaataaaatgataaaaggagccagattgtttaatgtgtttgctgctttggataacaaagatgttactatttaccggatgccgggattggggcattttaaaagaaatgatgtactggtttttaattttccttatcagatgaatcggtgggatagcatccggatgaacgtaatgcagtattatgtgaaacgttgtatagctttgcctggggatacattggaaatcagaggaggattttataaagtgcgtggatgtcgcgaacagttgggaaattatgaagctcagcaatatcttgccgggctacagcaaccggaaaaacaaggaatcgtagtaggaacatttccttatgatcaaagcctaggatggaatattcgagagttcgggccattgcctatcccacaaaaggatcagattgtaataatgaaccatactacttatcttttatacagacaactgatcgcatgggagcaaaagaaaaaaatagaactaaaacaggaacaggtgtttattggtgatagtcttattcatcagtattgctttaaaaagaactattattttgtatcgggggataatatggcgaattcgcaggattccagatattgggggatgctgccggaagaatatattgtaggtaaagctacccgtatttggaactcaaaagaaaaatataccgatcagatacgttgggaacggattttaatgcagatcaaataaagatagaagatgttattacagaataaatatatcgttcatttattaatgctgtttggagtcattgcacttttaagtgttgtgactgtttcatcttatactattgcggtcggagatatggcatatcagaagctatatttggggcatatgtctattgtctttgtgatatgtactcttatgtctttgtgcttagattgtaagaaaaatgcattttatttatcagtcgtttggtctcttattattttaggtggggttgaggctgtttggggattaaggcagatatacggtttagctgtttctaatcattcattatatgcgcttacaggttctttctacaatccggggccttattccggatacttagcaatggtatttcctatttgtttgagtgaatggttgaatctaaaaaaggtgaagaaacgtacttggatcgagcaaagtaaatattgtgtggctttaggagtcttgctgttaattctttgtgttttaccggcaggtatgagccgttcggcatggatggctgttgcaatttctgggatatgggtatatgctacataccgttcatggggaactagtttaaggaagataggccgaaaatataagaaaagagtatttccggctattattgccgggggaatggtattgataatagttggttatgctctttttcaattaaaagtagattcggctaatggacgtctgttaatttggaaagtgagtgttatggctattgtggaaaaacctttccttggacatggtactggaaactttgcatcggcttatggaatggctcaggaaaaatatttctcccaaaaagagtttacatctacagaagaattagtagctggaagtcctgaatacgcttttaatgaatatctgcaaatagctgtagaatatggagtcttatttctattggttgtgttattgattattgttttttgcctttggataggaataacagagaaaagactaagtgcatgtgctggtttgatttctgttttagtatttgcattttcatcttatccaatgcaaatacccggatttgctatagcattctattttttattggctgcttgtgtagtgggttcttcacggttacaaatattgttctttattataatgattgctttattgggaagttactattggaaatataatcagtataatgcttgtgaagaatggtttaggtataaaatgcactataatataggcgcatttcgtttagccaaagaagggtatgagaaaatttatccggaattgaatgataggggagcatttttgtttgaatatggacattctttacataagttgaaagaatataatagttctacagcaattttgaaagaggcaatggcacatagttgcgatcctatgattttgaacataataggaaagaattatcaggctataggaaaatatgaaaaggctgaagagtatttcatacgatctactcatcggcttccgggaagaatttatccatattacttgttggcaaagctttatgcggaaccggaatatcgacatccggagaaattaaaacaggcgattcagattgtattgacgaaggaaccaaaggtacaatcgactgcaataagggagatgagagaagaagtgaaactgctaaaataaatgggtgaagaaaaaaaatgactgtacaaacttgattaatagatatttttgtctaaatttggcaaacatgatacaaacttacatacaatatataagaaattatatgtgagataatttagaataaacaaaccaataaatacgatgaaaaataattctacatggattttattgtgccttgcatgtatgatgacgctctcttgttccgacaagaagaatactgcagatgaatcggagaaaggtgtctccatagtccttccggatacgaagaatgaagtagctgttcagatattaaagaagcgtgattttcatcacgaactggtgagtaacggtaaaatcaatgcccgtggcaaagccgatctgcgttttgaaaccggtgaagtcatcgctcatatctatgtgaagaatggcgaccgtgtacagaaaggacagaagctggctgatctggataaattccgtctggaacagaaattatcccagtcggaagatgctttactgaaagccgaactggaattgaaagacgtactgatcgggcagggatattctcctgacgactttagtaaagtccctgccgaaacaatgaaaatcgccaaagtaaaaagcgggtatgaacagtcgaaatcccagtatgaactggcgaaaagagagatggagcatgctacgttgattgctccttttgacggtgtggtagccaatttattttcaaagccttataatccggcaaatacttctgaagcattctgtactattattgattccaaaggaatggaagctgatttcacagtgctggaaaatgaacttgcttttatcaggatgggagataaagtggtaattactccttatgccggaggagatgcgtttgaaggcagtgtatcagagataaatccattggtggatgccaacggcatggtgaaagtgaaagcattggtaaatgcgggaggaaaactgttcagcggaatgaatgtaagggtaagtgtccgccgttcgctgggagaacggctggttattccgaagagcgccgttgtattgcgttccggcaaacaagtggtatttaccctgaaagacggcaaggcaatgtggaattatgtgaatacgggactggagaatgcgacagaatgtgtcgtctccgacaagtcgcagaaaggtatcgaggatggtctgctggaaggagatacggtcatcgtcaccggaaatctgaatctggcgcatgaggcggaagtctatgttaaatgaagaattaagaattaaataatgaatctatgataaaattcttaattcagcgccctattgccgtattgatggcctttaccgcctgtttcatcatcgggctggtgacgtactctacgctgcctatatcgctgcttcccaatatcgctattcctgagattacggtacaggtggcgtctgccaatacctctgcccgggaattggaaaacacgattgtcaaacctttgcgggggcagttgattcaggtctctaccctgaaggatattcatagtgaatcgagagacggggcgggcattatccgcttgtcatttgaatatggaacgaatacggaccttgcctttatcgaggtaaatgagaagatagatgccgccatgaactatcttccgaaagaagcggaacgcccgaaggtaatcaaagcgagtgcaacggatattcccgtattctatctgaatctgacactgaagaatgacagtgcttacggagctacggaacagcactccttccttgaattgtgtgagtttgccgagtctgtcatcaagcgcaggatagagcagcttgaagaagttgccatggtggacgtgaccggaattttggaacggcaggtacaaatagtgcccgacaaggacaagctcgccatgatgggactctccattggagatatcgaatcggctttatcctctaataatgtggaaccgggcagcatgacagtgcgcgacgggtattatgaatacaatattaaattctcgacattgctgcgtacagcggaggatgtggaaaatatctatctgcgtaagggcgaccgcatcgtacagttaaaagacttctgcaaagtaagcgtcgtacctgtaaaagaaaaaggagtatccttgtccaatggaaaacgggcggtgagccttgccgtcatcaaacaggcggatgagaacatggataagatgaagcaggcgctggtaggcacgatgacctattttcagttagtatacccggagatcgatttcagcatcagccgtaatcagacggaactgctggactacaccatctctaatctgcaacagaatctctcccttggttttctctttatttgtctggtagcggttctgtttctgggagatgtaaagtctccgctggtcatcggactcagtatggtggtgtccatcgtgatcagctttgtctttttctacctttgcaatatgtctctcaatatcatttcacttgccggattgatcctggcattgggaatgatgattgacagttcgattattgtgaccgagaatatatcgcaataccgtgaacgggggtactccttgcgccgtgcctgtgtgacgggaaccagtgaagtggtcacccccatgctgagttcttctctgacgactattgctgtctttgccccgttgatttttatgagcggtattgcaggcgctattttctttgatcaggctttttctgtcactgtaggactaatggtgtcttatctcaccggtatcatgctgcttcccgtactttatctgctggtttaccggacaggtgtccgcacccggaaatggaagtggctttctttcaaaattaataacccgatcaaggaccacacgctagaccgattctatgatgcgggtgtcgactgggtattccgccataaaacgttcagtgtactgttctgtgtgatttccattccgctttgcatattcttctttttctttatagacaaagaacggatgcccgatatcgaggagaatgaactgatcgcccggatagaatggaatgagaatatccatgtggatgaaaacaaacgacgggtggatgaacttttcaaggaactgaaagatgaagtactggagcaaacagcctctatcggtagacaggacttcatcctcaatcgggaacgggaactgtcttcttccgaagcggaactttatttccgtacggagacttccgacgctattgctcctttggaacagacggtataccggaaactgaaggaacgttatccactctctgtcatctctttctctccgccggaaacggtctttgagaaactctttgtgacgggtgaaccggatgtggtggcggaattttacacccgtaataaagcggaagcccccaaagcggaagcaatccgcagcgtggaacaggaactgggacgaaaaaccggaatcaatccgacaggtatcgccttcgaaaaccagttgaatctgagtatcagtaaagagaaactcttgctctaccgtgtttcctacaacgaactgtatcgggtactgaaaacggctttccgggaaaacagtgtgacgatgctgcactcttatcagcaatatttgccgatcaacattgccggggatgaaaagactgtgaacgaggtgttgcaggaaacactggtgcagacgcaaccggacaaccgtgggaatgtcgattttatcccgcttcgggaattgatcaacgtagctcccgccgaagacttgaaaagtattacttccggacgtaatggcgagtatgtcccgttcgacttttacggcgtgcaggatgcgaaccggctgatgcgtgaagtgaaacaggtggcggaggaaacaggggactgggatacgggcttctccggcagtatcttctccaacaaggagatgctggatgaactggtcgtgattctgttgatctcactgctgctgatgtatttcattcttgccgcacagttcgagagttttctgcagccgttgctggtactggcggaaatcccgattgatgtggcatttgccttactcttgctttggatatgcgggcatacgctgaatctgatgtctgccatcggtctgattgtgacctgtggtattgtaatcaatgactctattctgaaactggatgcgatcaatgaactgcgcaaggcaggcgttcctttgctggaagctattcacgaagcaggccgcaggcgtctgcgtccgattatcatgacttcgctgacgaccatctttgccatggtgccgttgctgttctcctcggatatgggatcggaactgcaaaagccgttgtctatcgccatgataggcacgatgtccatcggtacggcggtcagcctctttatcataccgctgctttactggtttatctatcggggaaaaagcgggaatcacaaaccaaatgaaaaacatgttgaattatgaagaaatcatccgttctttttgtattgatggcagcatcggggatatgtttctcttcagtatatgcccagaaacgtctggtgctggacttgaaccagactatcgctttagctaacgacagttcgctggagtcattccgcacacaaaatatgtatctgtccggttattgggaataccggacgtaccgggcaaaccgtttgccgagtctgacaatggaccttaccccggcacaatataaccgggatatcacgaaacgttatgattcgggacaggacctggatgtctaccgtacgcaacagtcatattatgcctatggaggattaagtgtccgtcaaaatctggacttgaccggaggtacgttctatctggagtcgaaccttgcctatatgcgtaatttcggggataatagtgcgacgcagtttaccagcgtcccgatacggctcggttattcgcagagcctggttgggtataatcctttcaaatgggaccggaagatcgaaccgctgaaatacgagcgtgtgaaaaaggaatttctttataatgtggaaaaggtttcggaaacggcgacgaattatttcttttcgctggcgatggcgcaggcggaatacaaactggcaaaggagaacctcgcatctacggatactttgtaccgcatcggacagcaacggcaccggatcgccgctatttcacaggcggacctgttgactttaaagctggataaagtgaatgcacagaatacattgcagaatagggcaagcgccttgaaacgggcaatgttctcactggcatcttttctgaatctggataagaatacccagatcgaactggagcttccttcacgcccaagtatgatggagattccggtggatgaggctttgagatggggaaggagcaataatccgcagttgctggaactgaagcagaatgtactggaagcggaacggagtgtggacagaacaaagaaagaatcccgtttcaatgccagcgtgaatgccagtatcggtttcaaccaggtggcggaaaacttcggagatgtgtatcataaaccgatgcagcaggatttggtagcggtcagcgtatcgattccgctggtggactggggtgttcgtaagggcaaatacaacatggcacggaataatctgaatgtagtgaagatttcggcacgtcaggatgagatcagtattgaggaggaagtaatcatgacggtaagtgattttaatatccagcagcagttgattgccagtgcggaagaagcgctggacctggcgatactggcttataatgagacaaggcaacgttttattatcggtaaagcggatattaatagtctgacgctttcgctcaacaggcagcaggaggcgcagcgcaactatatttctgccttgcagaactactggctgaattattataaaatacgtcgtctgactttattcgattttgctacgaagctttctctttcggatcgtttcgactttaatggagggagactgatcagatagtaatttcttttgggatatagacaaatgaatcatgcaagatataggttctgaaattaaaaagtcatcaaaagcttccgcttttacgctcattgtcgcttttatcagtgtggcgttggtcgggctggcacttgttccgttgctgccggtgaagctgaatccgtcacggaccttacccggattttctgtatggttcggcatgggagggacttcggcgcgtgtcgtggagatgacggctaccagcaaactggaggcgatgcttgcccgtgtcaagggaatacaaagtatatcttcgacttccggcaatggctggggaagtataaatgtgagtctggacaagcatgcagatgcggctgtcgcacgttttgaggcttcgaccatcattcgtcagacatggccggaattgccggtgggagttagttacccgtacattcagatggcgagtccggagcagaaaagtcagggaccttttatcgcattcacgattaatgcgcctgccactcccagtctgattcagaagtatgcggaggaacatataaagacacgccttgcgcagcttccgggaatctataagataaacgtcagcggagccacaccgatggaatggcgtctggagtatgattatgagcagttgcgtgcgttgggggtgagtacggatgaaattagtcaggcagtcggtctgcattatcagaaagagtttctggggacttatgatgtggaacaggcggcttcgggcaaggaatggattcggttggtgctgatgcccgaacatgataaccgggagtttgacgccgggcagatacaggtgaaagtgaaggatgggagaatcatccgcttggacgaactggtgaaggtcgtccgtatggaagagcagcctcagagttattaccggatcaatgggttgaattcgatttatctgtctgttgtcgctgaagaggcagctaatcagctggaactgagcaaaaaggtacaggcgtgcatggatgacatcagactgtcgcttccggcaggatacgagattcataccagttatgatactacagagtttatacatgacgagctgaacaagatttatttgcgcacgggagtgacggtggctatcctgctcttgtttgtactgctgattactttcagccccaaatatctgtttttgattgtcaccagtctgaccgtgaatatggcaatagccgttatcttttactatgtctttgggctggaaatgcagttatattctttggcgggtatcacggtttcactgaacctggtgattgataatacgattgtgatgagtgatcattatcttcgatgtaaaaaccggaaggcgttcatgtctgtattggcggctacactgacaacaatgggagcgttggtcatcatcttctttctggacgagaggattcgtctgaatctgcaggattttgccgcagtggtgatgattaatctgggagtttcattattggttgctctgttctttgtaccttctttgattgataaaatcgggttgaaacgacgcaggaagtcttctctgaccggagtgaagagaaaatggaaaatggggaatacccgtttcttaggatggctgcgttcgaagatgcgaagggggctggtctatttcagtcatttctacaggtggctgatacagaggctttgccgctggagagtagcggtttgtctgttgctgttgctggcattcggattaccggtctttctgttgccggaaaagatggatggggatggcaaatgggcagagatttataataagacactggggactcctacctataaggaaaaggtgaaaccgatagtggataaagcgttgggaggaagtctgaggctgtttgtgcaaaaggtgtatgaagggagctactttacccggaatgaggaggtggtgctttatgccaacgccaatttaccgaacggcagtacgcttgaacagatgaatacactgatcaagcggatggaaacttatctgagcgagttcaaggagatcaagcagtttcagacatcggtagaaagcgcccacagggcatctatcagcattcgtttcacaaaggaaaatcagaaaagcgggttcccatatacgctgaaagctaacatgatcagtaaagctctccagttggggggaggagattggagtatttatggattacaggatcagggattcagtaatagtgtacgcgagaatgcgggatcattccgggtgaaaatgtacggatataattatgatgaactttatagctgggctacaaaactgaaagaggtcttattgtctcatcgccgtatcagggaagttacggtcggttccaatttctcgtggtggaaggatgattatcaggagttttattttgagctggataaacaacggatgatcggagcggggatcggagccggagaactgtttgctgctattcgtcccatatatgggcggaatcaggaaatcggttccgttgttaccgaagatggaacggaaaaaatcaaactctcttcccgccagtcggatcagcgggatatatgggccatgcagtattatcctttccgtgtaggcgataaagagtataaactggcggaactggctaaggtagagaagggacagatgccgcaggaagtggcgaaggagaatcaacaataccgcttatgcctgcaatatgagtatatcggtgcgtcggaacagggaaataagctgctgaaaaaagacctggaagagtttaatgaacttctcccgatgggatataaggcggaagcggaaagtaataactggtcatggggtggaggtgccaacaaacagtatcgcttgctcctgattgtgattgctatcattttctttattacaagcattctgttcaattcgttgaaacagccgttagcgatcatctttgtcattccgatctcttatatcggtgtgtttctgacgttctactggttcaagttgaactttgaccagggtggtttcgcttcgttcattctgctctgcggtatcacagtgaatgccagtatttatattttaaatgagtacaatgcgattcgaaaacgctttccctgcctttcttctcttcgtgcttacgtgaaggcatggaatacgaaagtgatccctatttttctgacggttgtttctaccatccttggctttatcccctttatggtgggagcagagaaagaaggtttctggtttcctttggctgcaggtactatcggtggactggtaatgtccgtgatcggcgtgtttattttcttgccggtactgactttgaataaaaagaagatgatggtgaagaagccttgaagaaataaattagctattagcatatttcgattagctaatagctaatttgtttttgctaatagctaatcgaaataaggtataggagataattcaccagttatttcctgcattgctgctgccgatcagcatttctacccgttgcttatacaagttggctccctcagcgatgttctttcccgcatctgcggttcccattccgtaaacaacaacaggtgtttgccacgacatccccgaatgaatggcactaacctgataaggacgtaaaagctcatccactgtgaagcggtttctgcctccgctgcggtatgcctcatattcggaacctgtggtggttactactgtcaatggtttcccggctactgccggagtcttggaaaggaaggtgaatacttcgtcctgccattttttgagcaatgacggcgcagccatccaatgaaagggaaattgataaatgagggcggaagcatcggaaatgattttgctccattcgtcaacatcaaaagaagcgccttgctggtcgtaaagattgaatactgctacgccttcaatatcactcacagcatcaatcagtgctttgtttgcttgtgattccttcatattgggatgcgccaggagaatcaccacttttcttaaatctttattcataatcaatcgggtatttaggatgaaacaactacatctataatatacaaggtctaaaaataagaaaaagttttcgaaactcaatatcttaattaaaaataaaagaatctctctttgcttttgaatttgtatttttgcaggcacgtccgtaaggcgttattttagataataaatttatatatgatagatttcacccaatttccttctccttgctatattatggaggaagaactcttgcgaaagaacctgtgtctgataaaaagcgtagccgacagggtaggagtagagattattctcgccttcaagtcattcgccatgtggcgttcatttccgatattccgcgaatacgtggagcattccacagcaagttctgtgtatgaagcgcgtctggcattggaagaatttggaagtaaagcccatacttattctcctgcgtatacggaacaggattttccggaaatcatgcgttgcagcagccacatcacttttaattcaatggcacagttccgtcgtttctatccgatgacagtggccgaaggaagcggaatctcctgcggtatccgtgtgaatcccgaatattcggaagtagaaacagaactttataatccgtgcgcacccggtacccgtttcggaatgaccgccgacttattaccggataccttgcccaaaggaatcgaaggtttccattgtcattgtcactgcgaatcttcttctttcgagctggaacgtactttgcagcatctagaagagaaattctcccgctggttcccgcaaattaaatggctgaatctgggaggcgggcatctgatgacccgaaaagattatgatacagaacatctgattaaattattgcaagacctgaaagcacgatatcctcatttgcagatcatccttgaacccggttctgcttttacatggcagacaggagtcctgacttcggaagtggtagatatcgttgagagtcgcggtatcaagacggctattctgaatgtgagtttcacctgccacatgcccgattgtctggaaatgccttatcagcctgccgttcgtggtgcggagatggggaatgaaggagaatttatttatcgtttgggaggtaattcttgtttgagtggtgattatatgggagtatggagtttcgatcatgagttgcagatcggagaacggattgtgttcgaagatatgattcactatactatggtcaagacaaatatgtttaacggaatccatcatcccgccatcgctttgtggacaaaagaagggaaagcggaaatatacaagcaattttcttatgaagactatcgggaccgaatgagttgataatcaaaacaattgtttgtttgcggaaacaaagtgtgcagattcttgtgaaaaaaagatgcagaatgtttgcagaattacggaaaatccctacctttgcaaccgcaaacgaaaaaatgcggaaatagctcagttggtagagcataaccttgccaaggttagggtcgcgagttcgagtctcgttttccgctcatgtttctttgaaatgttggaaatataatctttgcccaggtggcggaattggtagacgcgcacgtttcaggtgcgtgtgtcgagaggcatgcaggttcgagtcctgttctgggcacaaagattttaactttaaaattctggagaggtggcggaattggtagacgcgctactttgagggggtagtgacagttatgtcgtgggagttcgagtctccttctcttcacagtcattaaagttatttgcggaaatagctcagttggtagagcataaccttgccaaggttagggtcgcgagttcgagtctcgttttccgctcatgtttctttgaaatgttggaactaaattttgcccaggtggcggaattggtagacgcgcacgtttcaggtgcgtgtgtcgagaggcatgcaggttcgagtcctgttctgggcacaagaaattcagatttctgaatggagaaaatttagtttgcggaaatagctcagttggtagagcataaccttgccaaggttagggtcgcgagttcgagtctcgttttccgctcaaagtagtgaggttgtcagtcgataagattggcgacctctttttgtaattacgaaagtcgatgtacttcccccaaaaagagtgtcatcgactcacacagacctataattaatttaagaacttgtgatatgttaacacaaatcattaatgcgcgcatcctcacccctcagggctggttgaaggatgggtccgtacttattcgtgatcataaaattctggaagtgactaactgcgacctggcggttatcggagcaaaactaattgatgccaagggtatgtatatcgttccgggaggagtagaaattcatgttcatggcggtggtggaagagactttatggaggggacggaagacgccttccggacagcgattaaagctcacatgcaacacggaactaccagtattttccccacactttcttcttctactattcctatgatccgtgcagccgcagaaacaaccgaaaagatgatggcagagccggacagtcccgtactcggcctgcatctggaaggacattacttcaatatggagatggcaggcggacagattccggagaatatcaaaaatcctgatccggaagagtatatccctttgctggaagaaacccattgcatcaaacgttgggatgcggcaccggaacttccgggggctatgcagttcggaaagtatatcaccgcaaaaggcgtattggcatctgtaggacatacacaggctgaatttgaagatatccagactgcgtatgaggcaggatatacgcatgctacccatttctacaatgctatgcccggatttcacaaacggaaggaatataagtatgaaggtacggtagaaagtatttatttgattgatgatatgacagtggaagtcgtggccgatggcattcatgtgcctcctaccattcttcgtctggtctataagataaaaggagtggagcgtacgtgcctgatcactgatgcgctggcttgtgcggcaagtgacagtaagactgcttttgatccgcgtgtcattatcgaagacggtgtgtgcaaactggcagaccgctctgcattggcaggaagtgtggcgacgatggaccgtctgatccgtacgatggtgcagaatgctgaaattcctttggcggatgctgtgaggatggcttccgagactccggcccgtatcatgggagtgctcgaccgcaaaggtacgttggaacgtggcaaggacgcggatattattgctttggatagagatctgaatgtaagagcggtctgggcgatgggacaattggtagaaggtacaaacaagctgttttaacgactaaaaaagaaaacgatgttaactcaaataatcaacggtagaatacttactccgcaaggctggctgaaagacggctctgtattgatttgtgatggaaaaatattagaggtaaccaacagtgatctggcagttatcggtgcaacagtgattgatgcgagaggaatgacaatcgtaccgggatttgtcagtatgcatgcgcatggtggcggcggccatgattttaccgaagcaacggaggaggctttccgtatcgcagcaactgctcatttgaagcatggagctaccggcatatttcctactttgtcatctacttcgtttgagaggatatatcaggcggtcgatgtttgcgagaagctgatgaaggaaccggagtctccgattctcggtctgcatatcgaaggaccttatctgaatccgaagatggcaggaagccagtatgacggttttctgaaaactcccgatgcgaatgaatatatgccgctgttggagcatacttcttgcatcaagcgctgggatatcagtcccgaattgcatggggcacatgattttgcaaaatacacttgttcaaagggaattatgacagccgttactcatacggaagctgaatatgatgagattaaggcggcgtatgcggtaggattctcgcatgctgctcatttctataatgcgatgcccggttttcacaaacgtcgcgaatataaatatgaaggtacggtagaaagtgtatatttgacagatggaatgacggtagaagttattgcagacggtattcatttgcctgctactattctgaaactggtttataaactgaaaggagttgagaatacctgtctggtgactgatgcgttggcttatgctgccaatgaagggaacgagccgattgatccgcgttatattattgaggacggagtatgtaagatggcggatcattctgcattagccggtagtttggcgactatggatgtgttggttcgtacgatggtgaagaaagcaagtattcctttggaagatgctgtgcgtatggcttccgaaactcctgcccgtctgattggtgtgagcgatcggaaaggggcattgtctaaaggtaaagatgctgatattgtgatacttgataaggaattgaatgtacggtgtgtctggtcgatgggaaaagttgttccggggactgatagattgctgcataaatgataagtgctatctgttaaatctgaaaatagaaagtccgaacctttaaattgcaaaaagcaattgggattcggactttttcagtaagaaaagtagtaatgtgagtactctatattctattttatcatgaaaatagagtcgtttctataaactctttcaattgaaccttattcattgtaccgagtttcattatcggtttgccattcaccgggcaaagcaaaaggttgggaattgtccgaatcttgaatgcactttccagttcctcttcctgatcgacgtctactttataaatgtccagtctccctttatattcttctgctaattggtccaatatgggtgataatgccttgcaataaccacaccatggagcatgaaaatcgactaaacaaggtttattccctttatattcccaattatccggataagattgataatcagcaactttctcaacaaagctttctttggttaaatctataattttcatatttcctgtttttaatgattcattatttatttctactttgcaaagataggggtatggtagagaaagagggatagccattcttcctgttgtgtttacaatttttcctttccttagatattttctaatcaaattctaatctgaaatgagagccttataatcgcttttatccagcctctaccgttgcagagttgtacttttgtcggaaaacaaattaaggtaacaaaaagattgcgatgaacagagcatttttatttttactatttcttctattggcaggaaagatgtgtgcgcaacaggttgcaggcacattgacactgaaagaagcagagcagcgttttttagagcgcaatttatcgttgatagccgagcggtacaatatcgacatggcacaggcgcaggtattacaagccaaattgtttgaaaatccggtcatttcgctggaacagaatgtctacaaccgattgaacgggaagtattttgattttggaaaagaaggggaagctgttgttgaaatagaacaggtgatccatcttgccggtcagcggaacaagcaagtccggctggaaaaaatcaataaggaaatagctgaataccagtttgaagaagtaatgcggacgctccgtcaggaattgaatgaaaagtttgtagaagtctactttctttctaagtccattgccatctatgaaaaggaagtaaattccctgcaagtacttttgggcggaatgaaaattcagcaggaaaagggaaacatctctttaatggaaatttcccgtctggaatccatgctcttctccttgaggaaagagaagaacgaacgggagaatgatttactgactaccaggggagaactgaatttattactgaaccttccggaagatacacaagttcaactctcattagacgaagaagtactgcaacaactggacctgtcgcaattatcatttgcagacctgaaagcaatcatcaatgaacggcccgaccaaaagattgcccgaagcacagtgaatgcctcccgtgcaaatctgaaactacagaagtcaatggcctttcccgagttctctgtgaaagggaattatgaccgtgtaggaaactttatcaatgactatttcgcgataggagtaagcctgtccgtacctatcttcaaccgtaatcagggaaatatcaaagcagcccgcttcagtatccagcaggcgggagtgcagcaggaatatgctgccaatcgtgccgatatggaactcttcaccgcttatacgtctctggagaaagcgactcaactctatcaatccactaatatggacctggaacgtaacttcgagaaattgatcacaggagtcaatgagaatttcaccagaaagaatatcagcctgctggaatttatcgactattatgacagctataaagaaacctgtatccaactatacgagataaagaaaaacgtatttctcgctatggaaaacctgaatacagttgtcggacaaaatgtattgaactactaataaaccgaccaatatgaaacgattaaagatcacaatccataaattatcaaagactatgaactggaataaatttcttccttgtatattgtttggcagccttttgggagcatgctccggaaaaggagaacaacccaaagtagaaccgactacactatgcctgacggacagcctgctgagaatcgtatccgtcgataccgtgcacgtctgtgaagtggtagatgaactgacattgaatggacgggtcactttcaatcaggatcaggtggcaaatgtgtatccgatgttcggaggaaccgtgacggaactgcgtgccgaaataggagactttgttcacaaaggagaagtgctggcagtgatccgtagcggggaagtggcggattatgagaaacaattgaaagaagctgaacaacaactcttgctggcccggcggaacatggatgccacacaggatatgtacacttccggcatggcatcggataaagatgtacttcaggccaagcaggaactggcaactgcggaagcggaagaaagacgaatcaaagaaatattctccatttatcacttctccggaaatgctttttatcagctcaaatctcccgtatcaggctttattgtggaaaagcagattagcagggatatgcagctgcgccccgaccagggggatgcgctgtttacgatttccggtctgtccgatgtatgggtgatggcggatgtgtatgaaagtgatattagtaaggtttccgagggagctgatgtccgtatctcgactttggcatatccggaaaggacatttacaggtacgatcgacaaggcctatcacctgttggacagtgaaagtaagacaatgaacgtacgcatcaaactgaaaaacgaagattacctgctgaagccgggtatgtttacaaacgtgagcgtgaagtgtaaagcggaagatacttccatgcctcgtatcgactcccatgcgctggtgttcgagggaggaaagaattatgtggtcacagtagagcctgaccagcgtctgaagataaaggaagtagacgtttacaaacagttgagcaaggaatgttatgtccgttccggtctttccgaaggagacagggtactgaataataatgtattgttagtgtataatgctttgaatgcggattaaaaatcagagaatagtatgcataaattcatagataatatagtagccttctcgctgaagaataagttctttatattcttctgtacggtgattgccgttatagccggagccgtctcattcaaacatacgccgatagatgcctttccggatgtaacgaatacaaaagtgacgatcatcacgcaatgggcgggccgtagtgcggaagaggtggagaaatttatcacgattcccattgagatagccatgaatcccgtacagaaaaaaacggatattcgttcgaccactcttttcggactttctgtgatcaatgtaatgttcgaagatcgtgttgatgactttacagcccgtcagcaagtctacaatttgctgaatgatgccgatcttcccgaaggcgtgactcccgaagtacagcctttgtacggacctaccggagaaatctatcgctacaccctgcgcagtgacagacgtagtgtacgcgatttgaaaacgattcaggactgggtgatcgaacgaaatctccgttcggtatcaggtgtagctgatatcgtcagtttcggtggcgaggtgaagacatttgaagtaagcgtgaatcctcatcagttgattaattacggaattacctctctcgaactttatgacgcgatagccaagagtaatatcaatgtaggaggagatgtcatcacgaaaagttctcaggcatacgtagtccggggaatcggtttgataaacgatctggatgaattgcgaaacattgtagtgaagaacatcaacggaacgccgattctcgtaaagaacctggcagatgttcacgaatcctgcctgccccgcctcggacaagtgggacgaatggatgagaacgatgtcgttcagggaattgtggtgatgcgtaaaggggagaaccccggtgaagtcattgcaaatctgaaagataagatagaagaattgaatcagaatgtacttcctgaagatgtacggataataccgttctacgaccgtgaggacttggtgaacctggcggtaaaaacggtgacccataatctgattgaaggaatattgttggttacgtttattgtgttaatcttcatggcagattggcggacaaccgtgattgttgcggtaattattccattagctttgttattcgcatttatttgtttacgcgtgatggggatgtctgccaatctgctttctatgggggccattgactttggtattattatcgatggggcagtggtgatggtggaaggtgtgtttgtcgctttggacaagaaggcgaaagaggtgggaatgcccgcattcaatgtgatgtccaagatgggactgatccgtcacaccgccaaggataaggcaaaagcggtatttttctccaaactgatcatcattaccgctttgattcctatcttctcttttcagaaagtggaaggaaaaatgttctcacctttggcatatacattgggttttgctttgctgggtgcgcttattttcacattaacgctggttcccgtcatgtcgtccatgttgctgaaaaagaatgtacgcgaaaagaacaatcgctttgtccatttcatcaatcaaaagtgtacggctctttttgatactttctatgcccatcgtaagctgactatcggactggcaactgtggttgcaggagtcggtttatggcttttctccttccttgggacggagtttcttcctcagctcaacgaaggttcgatctacatccgtgctacgctgccgcaaagtatatcgctggatgaatccgtaacgctggcaaataagatgagaaagaaactattgaccttccccgaagtgaggcaggtattgtctcaaaccggacgtcccaacgacggaacggatgcaaccggattttataatattgagtttcatgtagatatttatccggagaaagactgggaaagcaagctgaccaaactgcagcttatcgacaagatgcaggaagatttatccgtttatcccggcattgactttaacttttcgcagccgattacggataatgtggaagaagcggcctccggtgtaaaaggctctattgcggtgaaagtgttcggtaaagacttgtacgaatcggaaaaactggccgttcagattgataagatattaaataccgtgcagggaattgaggacttgggagtgattcgcaatatcggccagccggaacttcgtatcgaactgaatgagcgtcagttggcacgttatggagtggctaaggaggatgttcagtctatcattgaaatggctattggcgggaagtcagcttcgctgttgtatgaggacgaacggaaatttaatatcatggtgaggtatagtgaagagttccgtcagaatgaagaggagataggtaagatactggttccggcgatggacggaacgatggtacctattaaggaactggcagatatcaccacaatcacaggaccattattgatcttccgtgacaaccatgcccgtttctgtgctgtcaagttctcggtgagaggacgggatatgggtacggcagttgccgaagcgcagaaaaaggtaaatgcttccgtccatttaccggcaggatattctttgaaatggacgggtgattttgagaatcagcagcgtgcttcgaaacgtctggcacaggtagttcctatcagcattgccattattttcattattctgtttattctcttctccaatgccagagatgcaggactggtattgctgaatgtaccgtttgctgccgtgggaggtatcgcagcccttctgataacgggcttcaatttctctatatcggcgggtatcggttttatcgctttgttcggtatctgcatacagaatggcgttattatgatttccgatatcaaggcaaatctaaaactgggttcgtccttacaggaggccactaaagaaggagtccgttcacgtatccgccctgtgataatgacagcggctatggcagctatcggtctgttgcctgcggctatgagtcatggtatcggttcggaatcacagcgtccgttggcgattgtcattatcggcggattgataggagcgactttcttcgccttgttcatcttcccgctgattgtggaagtagtgtatgaacgaatgctatatgataaaaacggaaaattattgcaaagacgtatctaattcattttctattctttctatgaaagaaacggcatagattaaattttaatttcgttttcagtaggtagaagtgaggaagggacaaaagtcggttggatcagaagatcacccgtacttttgttcctttttctatttccgaagatatttccagtctggcgttgtaggcagatactattttcagcgtcaggctgaggccgatgccctgacctgcatagtcatgtgtgttgctgcctcgatagaaagactggaatatatgttctatttcttccggaggaatgccgatgccctgatcttttatttcaagaacgaggtgttgatctttttggctgagcgtaatgtctacttccttttcagaatatttgcaggcattatcgatgatattctttaaagctattttgagcagataaggattggcctttacagtggaagccttacctgtttcttgatgatggaaacggattcgttcgttcatttttattaagtcattcagcatatccggcagagacattgcctccatattgctttttatgagctcttcatcctgacgtgaaaggaaaagaagatggcggatcagattggagattcgcttgctttcggatgagattcgttgcagggcttcgatatattctccggtacttctttctttcagcagactgatttcacattctccctgtatggcggttatggggttgttcagttcatgcgaagcatggctgacaaaggacttttcagctttaaaagcactgtccagacggtcgagcatgctattcagtgttttgatcatgtcttccagttcatcgttgtttccggtcgtctttaaccggcggttcagactgttggctcgtatcctcttcagctccttcagtatatgctgcagggggataagaatacggccggaatagattttcccgactaaataaatcaggatggaactgaataaaaccagaaagatggagagaagcaagaggtgttctttgatttctgcaccgtacacattccgggacatgactaggacgatgaaattcccttcattatcgggataataaagggcggctcccaactggtctttgtatttaaaagaaaaaggaatgctgtcttcaccggctatcaggagtgcctgttgatgctgggtcagatatttgttcagtgtgtcacggacttcggagagactgtccatatttaaaagaatctcatgagcttcgggcaggagttcgtcatatttgcgctggataatctggtaactctgttcgtctatttcgtctttctcccagtgcttttgtgcggtcagatatgctttttcacgaaggtaggaggcatagagtttattgataaactgtgtgctgaaaagatagaatacggcaataatgatgatagttgtcagtacactgagcaacgtatagaagagagctattttagaacctattttcatacacggatttatttgatggatgttcaggcattcatgatatatcctaatcctactaccgtatgaatcagtttcttgtcgaagtcacggtctatctttacccgtagataattgacgtatacgtctacgatgttggtattcgtatcaaagttcttgtcccatacgtctttgagcagcgtaatgcgcgacaaggctaccccttggtgagtcatgaaatattcgagcagacggtattcttttacggtgagatcgatatccgcatcacctcttttcgcccgtctggtgttacagtccaataccagattgtcgcaagtcagttgattggttacagtctccttgtttcgtcgcagcagcgccttgatacgtgcttccagttcctgaaaactgaaaggcttgacaagataatcgtctgctcctgcatccagtccttttacaatgtcttccgtagtgcctaaagccgtcagcataatgaccggtgtctggtaaccgaacatctgccgatagagatggcaaagttcgagcccgtttattttcggcatgataatatccaggattacaaggtcgaaaggttcttcctgaaggattctccaacccgtatttccgtcatgacagactgttaccgaatgtccgaactctttcagtccccgttcgataaaggaggcgatattgacttcatcttctgctaatagtatctttgccataaatctacattgtttagatgcaaagatactttttctttgcatccgaagaaagaaaaacggcatacatttaagtgtttctcctttctgaactgtattatatataaacagacgattatactatgaaagtaaaacatttagttggagcttttctgtgtgtgctgggatgctatgcctgtagtagcccgaaaacagaggtccagtcaccggacggacatatcaagatgacattgacggtagacgaaaacggcaaaccgttttataatgtgtcggtggatgactccctcttgatagaaaattcagccatgggctttacggcggctaacggcatcattctggcagaaggttttcaggtgaagaacacgactttcagcagtgaagacgaaacttggacacagccgtggggagaaaacaaaaagaaccggaatcattataacgaaatggcagtcagcctgacaaatgaagatcaggtacaactgacactccgtttccgtgtatttgatgatggaatcggtttccgctatgaatacacggtgccgactgtagattctttattgattaccgacgaactgactactttccatttccatcgtgacggaacttcgtggtcgattcccgccagtgccgaaacatatgaactactttatcaacaacaaccgatttccgaagtggaaacggctaatacacctttcacattcaagactgcggatggagtttacggaagtatacacgaagccgctttgtatgattttccggaaatgactctgaagcaaatcggccattatacattgaaagcggaacttgccccgtggcctgacggcattaaggcgcgtaagggaaatcacttcacgacctcatggcgcaccatacagatcgcaccggaagctgtcggtttgatcaactcttcactcattctgaatctgaatgatccttgcgtactggaaactacggactggattcgcccgctgaaatatgtaggagtatggtgggggatgcatctcggcgtagagacctggaagatggacgaacgtcacggagctactactgccaatgcaaagaaatacatagattttgccgcggccaatcatatcgaagctgtcctgttcgaaggttggaacgaaggttgggagagttggggcggtatgcagagctttgatttcaccaagccatatgcggatttcgatattgatgaaatcgtacgttatgccaaagagaaaggtgttgaaatcatgggacatcatgagaccggagggaatattcctaactatgaacgtcagatggatcatgccatgcaatggtataccgatcatggtatccacctcctgaagacgggatatgcaggcgcatttccggatgggtatctgcatcatagccaatacggtgtcaatcactatcaacgggtagtggaaactgccgcccgtcatcaaatgactctggatgcacacgaaccgatcaaagataccggtatccgtcgtacatggccgaatatgatgacacgtgagggggcaagaggcatggaatggaatgcgtggagtgaaggcaatcctccttctcatcacgtgatgttaccgttcacccgcctgctgtccggtccgatggattatacgccgggaacttttgatattctgttcttgaaaacgaaggattctccgcgccgacagaagtggaacgatcaggataaaggcaatagccgtgtgaatacgacgctggctaaacaactggctaattgggtaatcctgtattctcctttgcagatggcttcggatatgatcgagcattatgaaggacatccggcattccagttcttccgtgattttgatccggattgtgatgaatcgaaagcactggcaggtgaaccgggagagttcattgcagtggtacgtaaagcaaaaggcaattatttcctgggagcagctactaatgaaagcccccgtactttagaagtaaaattggacttcctggaaccaggcaagcagtataaggctgtcatctatgcggatggcgaaaaggctgactggaaaacgaatcctaccgattataagattacggaacagattgtaacatctgaaaatacgttgagtatacggatggctcccggaggcgggcaggctgtttcgtttataaaaagtaataggtaataggtaataagtaataggtgagggtaataagtgaggttgttaaagtagagagattgtcggaggataacaagataaaattaagttggttaggttagactgaaaaaacggtggacagagttttgatacctgttcaccgtttttgtttttattgagtatggttttgaaaggatgtgttatccttttgcttcctgatacataaagcgtttgattgatttcttcgcagtcttttcaaattcctcgaaatggattttgactttgcttatctgagaataattgggaagctgctgattcagttcaacacgattggcttccataacttttatgatatcggcctgttgcaagccatgggcaaaagcatcgtcaaagtccggataaatcagtgcgaccaacttgtcgtgctgcaaaacgatcagtgactcggcaacataaggcatattattcagtttgctttctatctcttccggatagatattctgtccgctggaagtcagaagcagattcttgctacgaccgcgaactgtcacatatccttcgtcgtcgattgtccctaaatcacccgtgtgaagccatccgttggcatcaataatttgtgccgtcgcttccggatttttataatatcccagcatcatattcattcccctgcatacgatttctccggcatgtgttttagggtcgggcgagtcgatgcggacttccattcgggtggttgccttgccgcaggaagccagtttcagtgtttcccaacggctggagcaaataatcgggccacattcggtcataccgtaagcgatggtgtagggaaagcctatctttttgaggaacgcttctacttcggcattgaaaggagcaccaccgataatgatttcatcgaagttcccaccgaagatttccatagcagcctgccgcgccaacgatttgattttatcgtttacaatgggcactttaagcaatagtttaccgattttgctgtccactctcggaagaatatcttttttgataattttctctacgatcaaaggtacacaggagatcactcttggctttatttctgcaaaagactgcgcaataatcttcggagacggcatacgtgtcaggaagtaaatgtgcgctccggcagagaaaccatataagaaatcgtataccatgccgaatacatgacccatcggaagcatggaaacgatgtgatcgcccgctttcacgggaagcatctcgaaacagtatgtcacgttcgaccaaatactgcggtaggggagcatgactcctttggaatatccggtagtgccggaggtataattgatgatagccagttcttccggacggtccttccggtaacagatatgttcggggcggaaattcttcggataacgctgaccgtaaatagcgttccggtgttcgaaggcgtaagtcagtttctcgttgcgcgataccaatgcagtgaaatcggtgagtgaagcgataccttccagtagcggcattgcgtcttcattcagattttcccatgcctgatcgccgacaaagagtaatttggcttcggagtgattgacgatattatgaatattatccgctttgaactcatgcagaataggaacgatgacggctccgtaagtgatagtggctaagaaggtgactccccaatgggcactgttccggccgcagactgctattttatctcctggctggataccggcactttccaatacaatgtgaaacttggctatcttgcgcgctacatccttatattgaagcgtgattcctttgtagtctgtcaatgcatctttatcccagttttcaatgatgctctgttcaatataatcaatgaactgatgttcttgttccattcgatttttgcacatttgatttaaaattgcgcaaaaataacatttcattaacggaaaccgaagtttacaattaagttttacggttaattaacgggggaggaaaagctgactaaaaagtcggtagtaccttaaatggggctgactaaaaagttggtagtatcttaactctcctccttcgggaaggaggagtccccgtagggggaggtggtaggtgaacacataactctgttgtttacaatagaataggaataaaccttattttacctaccaccccggctttcagccacctctcctttccgaaaggaggggaattggagatactattgactttttagtcagtccctataaacatcaggattcgctgttggcttcctcgtcctctttgggcttttcggagatgagcagcaatttatcgttcacatgcagtttcagcgttccgttcggtatcaggaactcatccccacgtttcacaatcattaccagcgtgcctttggggagattcatatctttcagcgtatctgcctcttccagcatttcctgtgtgatagtcatatctttgaggtctgtatcaatctcttccggaagttccactccgaaatcattccccgtcttttccagcggtttggacagatgtaacaggcgggcaacgaaagaaaccgttgttccctgcactaccagtgaaacgattgtgatgaagaatacgacattaaagataatattcgatccttcgactcctgcaaccaccggataagtggcgaagataatgggaactgctccacgcaatcctacccaggagacgaacagccgcgatttcattgtaatcttccggaacggaagcaaacagaggaacacacttaacgggcgaccgatcacaatcatgaagacaccgatcaatagtgctactgctgcaacttccagcatttcatgaggattaacgagaagtccgaggcagaggaacatgatgatctggaacaaccaggtaagtccgtccatgaacgtataaatgtctttgcggtgcatgatcttgttgtttcctaccatgatacctgcgatatatacggcaaggtaaccatttcctttcagtaaatcagtgatagagaaggtgaagaaaacaaacgccagcaacaagataggatacaacgcctgattgtcgatgttgagcttgttcagcatacggatagccagttttccgagcacgtatccggcagccgcgccgactataaactgaatgatgaaagaagcggcgatagccccgactcccatacctgccgattggataaactgtatcaggacaatggtgagcatgtatgccatcgggtcgttacttccactttccagctccagcatggggcggaggttgtgtttcagattcatcttctgcgaacgcaggatggcgaacaccgaagccgagtccgtagaggacatggtagatgccagtagcaatgacgtggtgataggcagatagatattcgtccagctcattccggacagccaccagataaataatccggtgaaaagagcggttagtagaactccgacggtagaaagcacgatacctggacctaaaatgggtttgatttctctgaatttcgtatccatacctcccgaaaacaggatgatgcttaaagcaaccataccgatgaattgcgcatcttttgcgtcatgaaactggagtccgagtccgtcacttccgaacaacattcctactacgaggaacagtaataaggtgggcactccgaagcgatatcctgtttttccgacaacgatgctaacgaaaagtaagatagaaccaattagtagggtgttttctgctgtaaatatcataggcaatatattattaagttattaaatgtgtcgtaataggtctcaccgtgcgaagttacacattatttaaaacaaataaagagtctttttggatgtatttttgtgaaaaaaggtagttaaattgtctaaaaagattaattttgcactcaattaatctacatcatacttatggattcaaacaatcttactcctttacggaaaggagtggtaggagtacaattcttgtttgtagctttcggagctacggtgctcgtgccgcttttagtggggcttgacccttccaccgccttgttcacagccggcattggtacactcatttttcatgcggttacccgagggaaagtgcctatctttttaggaagtagttttgcgtttattgctccgataataaaagcgacagaactttacggattagcgggcactctgtccggaatggtgggcgtcgcattggtttattttgtaatgagcgcgttggtcaaatggcaaggggtgagggtgattgaacgtctgtttcctccggtggttattgggccggttattattctgatcggtttgtcactcgcggggacaggagtaaatatggcgaaggagaactgggtgctggccttgttgtcgctggttacggcagtcgttgtctcgatgaaagcgaaaggacttttgaagttgattcctatcttttgcggtatcattgtcggttatctggcggcatggcttttctatgatctggatttgtccggtgtgagggatgcggcatggatcgggctgccgcagttcgtgtttcccaagttctcatgggagccgatactgtttatgattccggtagctattgctccggtgatagagcatatcggagatgtatacgtggtcaatacagttacaggaaaagatttcgtgaaagatcccggtctgcatcgtacgttgttgggcgatgggctggcttgctgctttgccggattggtcggcggtcctccggtgacgacttattcggaggtgacgggtgcgatgtcattaacgaaaatcaccaatccgcaagtcatccggattgctgccatatccgctatcttattctccgttgtcggtaaaatcagtgcgttgctgaaatccattccaagtgcggtattggggggaattatgcttttgctgttcggaaccatcgcttgtgccggaataggtaatctggtaaataactgtattgatctgagccgtacaagaaacatcatcattgtctctctgacattgactgtcggcattggcggagctgttctcacgtggggagacttttcattatccggcatcggactggccgctttggtcggagtacttcttaatttgatattaccgaaggacgattgactctgttcttgaaatggtcaggactgtgtcaaggttaatagtaactaaactaggaccgacttttaatcagccccagtttagttactattgacacccctcctttttatatttaatagttaaggcttagaatgtatatacgtcttgtgtttatgacaagaacttcataatatcttcgtctgcggtactgatgccaccgattccgaattgttcgatcaatacgttttttacgtttggtgaaaggaaggccggaagagtaggtcccagatgaatattcttcactcccagtgccagcaatgccagcaatacgatcaccgctttctgttcgtaccatgcgatgttatatacgataggaagtttgttgacgtcgtccaatccgaatacttctttcagtttcagtgcgatgacagccagtgagtaactgtcgttacattgccctgcatccaatacgcggggaatgccgttaatgtcacctaaagccagtttgttgtatctgtatttagcacaaccggcagtcaggatgactgtatctttcggaagtttctcggcaaattcggtataatattcacgacttttcatacgtccgtcacatcctgccataacgaagaacttacggatcgctccgcttttcacggcttctactaccttatccgccaaagccactacctgtgcatgggcaaaacctccgatcaacgttccgctttcgatggccgtcggcggttgacattgcttggcatgtgcaatcagtgcggagaaatctttcggttttccgtctttgcgttcggggatgtagtgtgctccctccagtccgcaggctccggtgatgtagatacggtttttgtaagaagcgttggcacgcggaggaacgatgcagttactggtaaacaggatcggtccgttgaaactttcaaactcttctttctgtttccaccaggcatttccgtagtttcctgccagatgcttgtattttttcagttgggggtaataatgtgcggggagcatttcactgtgagtgtaaatgtctatacctgttccttcggtctgttccagcaattcttcgaggtctttcaggtcatgaccgctgataaggataccgggattattgcggacacctagattcacttccgatatttccggatttccgtagctgtttgtattggcggcatccagttgtgccatggcggaaactccgtgcttgcctgttgccaaagtaagctgaaccaattcttccatcgtaatatcattgcgggtgagctcggccagtgcactttgcataaaggcgaagatttccggcgactggtatccaaggttatgcgcatgctcaacgtaagccgccatacctttcagtccgtagtgtaccagttctttcagcgaacggatatcttcgtcgggtgtacgaagtactcctactgtcctggctttctcttcaaactcatcttcattcccatcccaaagacattcgtcgggagcatttgcaatggttactttgctggcgagttcgtttttcagttgtaatccttcttttatttttctgatgatggccgctttgtcaaaattggcgttagtgatggtgacgaacagggcatcgtagataaatttgtctgcttcttcagaaggatgtccttcccggcgcagatgttcgttgtacacggcgattcctcgtactacaaagagcagcaggtcttgcaggttagccacttcggatgtttttccgcatactccttttaaggtacagcctgtacccattgcggtctcttgacattgataacagaacatactcataacttttacgttttaattagtcttatttgattatgaacgcaaaagtagggggaaagtttgaggtaagtttgtaaccaatgttacattgggcgaaaaaaaaatggatgctatgagctaaattaaattagctataatcatattccgattagctataatgaaaaaaagattagctataatgaaaccggagtgaactcttggtcattgaatcagccggatcagccattctttctgtaagatagtaatctgtttccggtcggctatgatcataccgtcttcctgcatgtgcgacagttcacgtgccagagaaggacgggagacaccgaagtaatcgctcagttcctgttgcgagcggtcgagggtgatctgtagctgttgctgctgtttgtataaccgtagcagataagatgctatcttttgccggatagtcttgaaagacataaagaaaagcttatccgatagggtacgggcataattggcggatagattcatataattctccagaaactgctcgttcctacggaaaagctccagtacgctggctttggggatttcgattacctccgtcggttcgttggcggtcacttctaccggaaagcgattctcttctccgaaaaggaaaaggggggcaagggcccttggtgcggcaatgtcttctactttgatgagtcttccggaatagtctatcatttcgccacggacacttcctttggtcagtatcacgagacggttgcacacatctccctgtcgtgccagtatttctccttttctataagatcgggtgtggaaactgatctcttccagattggcggataacttctccggagtaatcccccggaataatgggttattggtgagtgcaggtgtcataggctggtctgttatttgaattttaatatgaatttcgtttctttgttgtccggtaacagcgtgaggcttccgcccgaaagacgcatgatttgacgcgaaatacttaggccgattccgctgcctccttctttggtagtgaagaaagggataaaaatatgctccgctatttccggtggaatgacgggaccgttattctttatctcaatcagcacttcttccgtttcgttgcaataaaccagaatgtcgatttgtccgtccggctgatcaccgattgcctgaatcgcatttttcagaagattaatgactacttgcgaaatcagattctcatctgcatgcaggatcaggtcggcaggatcgatctttgtatggaacgtgatgtggtcacaaggattctgatggcgggcaagttccaccattcgttcgatgaatgctttcaagtaaaacaatgaaggttccggagtcggtatccgtgtgaatttacggtaggattctacgaaagcaagcagcccttttcccgtggcactgatggtttgcagtccgtggctgatctcttcatccttgtcctccaccatcgagagaagcgtatcgctgagcgaagtgatgggagtcacggagttcatgatctcatgagtcagtactcgggtcaggcgaatccatgaatctatttccttttcgtccagttcaatattaatatcattcagtgcaaggatgcgcaaatgttctttgtgtacgttgatttctgacacgcgaatggacagattgaccgttccccgttcattgtgaaacaccacttgcagcttatctccggaacagcaactttctatcttctccatcagcgtagcatctactttactcaactgacggacatgggtaaatacattcaatcccaaaagccggagtgcttccttgtttttctgatagaccgctccgttatcattgagcaccagcagtcccgtgctgacaaagtcgagaatcagttcgtagtacttttcctgttgggcagtctccgcttttacattatataaaatgtgacccacccggttgagtgcccgattgatctgtttactctcgggagtaccggactcttcggggaaacggaaggcactgtcattattctccaacgcatcgatcatgaagagcacctgcttgatgtgcaggcgataaagccgaacttgccagatgatacttaagatcagcagacaggcactgacgctgaaccagacataagactgatgcacgcccaaacagatagtcgccagacagcaaatgaccgtcagtgataccctgaaccaatattggttggctacttgttgtagaatccggttcataatccgaattttttcatcttgttatagagagtctgtcgggtaattcccagttgcgcagctactgccgaaagatttcctgcacaggcatccagtgctttccgtatcatttgtacttccatctcttccaaggtggaaatattcttctcggatgtttctgtctttcgggaggataactggaacaattccgcagggatttgcaccccgtcgttaatgatgaccaccttttcgattgcgtgctccaattcgcggatattgccgtaccagggatgcgcggtaagcttttctttcgctgccggactgaatttcatcggttccttatcatattgcttgcagaagcggatgataaatctttcggcaagagggacaatatcttctttccgttccctcaaaggagggatttctatatgaatggtgttgatacggtagagtaagtcttcccgaaactcttcccggtctaccatttcctgcagattccggttggtggcgcatatcagacggatgtcaatagggatcggagtgttacttcccactcgcacgatatttcttcgttggatagccgtcaatagtttggcttgcaggtgataggggaggtttcctatttcatccagaaacaatgtgctgtgatcggcagcctcaaactttcctgtccggtcggtatgcgcatcggtaaaagagcctttcacatgcccgaagagttcgctttcaaataaagattcggtgattgctcccatgtccacagcaatcatttcctgttgcctgcggttggaaagagcgtgaatttcacgggcaagcatttcttttcctgttccgttttcaccggtaatcaggatattggcgtctgtggaggctaccttttcgatcagtgttcggagttgttgcatagacttgctttctccccaatagagtgccggagtgttgaccggttcctttttgtttcctgtcttacgtccttgctgtgcggatgaggcggcagcctgtagtgtttctaccagtttctgattattccagggcttgacgataaagtccgaagcaccttctttgattccccggatagcgagatcaatatccgcataagcagtaaaaagtacgacaggaagctcccgtcgtactttctttatttcgtgcagccagaacaatccttcattgccggtattgatgcccgaagtgaaattcatatccaatagtaccacttccggcgtttcctcccgtatcgcagtggccagtgtgaccggtgacgacagcgtgatgactttcgaaaagtagttttttaaaaggatttgtaccgcagtcagcacccctttattatcgtctacaatgatgattgttcctgatttactcatgttcgaattggtttgtacgctacaaacttacgaaaaagtaattcataattcaaaattcggatttgaatttatagccattggaactttaatccgaatgataaactcagataatcacggggacggaggtaactattcgttacgccactgatcagataaagatcgcatgtacttatctcgtagaagaaagtcacggactttgccagaaatctgcggttagggtcaatatcataggtcaaccgttgtcccatgaaaacatgaatacgcactttgcttgaaaaaccatagtatcctttcggataacgttccggttcgctgacccagaactgattgccgaatacagtattcagatacagtccgcaggaaagcggttcggtagagaatcctttccccaggttgatgctccagggcatatagttctgtttcagtgtcatggtcacttttgccttcttggacgaatatttcgggataaatccgagcaacaggtcagtttcccactggtttcgttttccgtaatcccatccggtaccgaaggagagtaatcccatatttccggcatattgtattttagagtgggtcggaatgatgcgttcccagtttttgcggaagcgatggacacgtttatcgtagccggtgcgaagaaccggttcggctacataaggcagtactgtgtctgctttgactattgtgaacgcagaatcaccctcatgaaaggctatgatagaatctgccttaatcaccagtttcagcgagtcgggtttgtagtttttgataattgtatctgtcctgcaagtagccgaaagcaggctggggaagagtagaagcatagtcagtactcctgcgcggatcatatatttagtattcaaccagttcatattcgtatttttccggggttatagtaaataccagataactgcgacttttcatgcagtcgctgacaatataatgcacatcgtcatcaaaaaggattctgtcatcgaatccgtgattatgggcggccgtgcagaactgtagttccggatattgggtgatgtagtactggaacggcttcgccacattatcattgaacacatctgcaaaaggatgtgcatgcatgctgactacggttttttcaaactcatccgccctgtctgttagttcctgttccataaaaccgaaattgggaataggttccgaataatcatattccagcgcattggtattaaggcagacgaatttcacattgcccgcgatgaatgagaagttggtaggtccgaaaacagcctgataagtttctgctccggtacccaggcagtcatgattcccgataaggacgacataaggcactttcagtccgttcatgatgtcccgctgccaaagaaactctttggtcagcccgaagtcactcatatctcctccgtgaatgacgaaatcgatatcatctctcttattgacctcttttacaaagtcttctgtctcatcataccatcgctgtgaatcgcccatcgtgataaaacggatggttgtctttcctttgcacttagcttctatttgttcaatgttatgagcatttacgtctgtctctccactgatacgtacatcgtaggggtggtagtctatcagatcgcatccggccagaagcaggcagaccaggagagtgtataaattcttgtttaccataaatagaataatttatttaattgaaaacttgatgcgaagatagagttttcagttgagatatgggcgattgcttgggtgaaataagaaaaatggaacaataaataggcattaatgcatactttccactgagaaaggaaatatgattgtctttgtctaataattagacgcatgtgtctaattattagacagtagatgatatgaccgataattataaatgattgaaaatgagtatcctcactattgtggcacgttatctgcatagcatcattaagaaaaataggaatatattatataatcatgagacaaatctattatgtcattcgaactttgctgcgggggcgtagttccaatgttgtcaaggtcatttctttagggcttgggctgacaatgagtattttattatttgcccgcgtggcttttgagcagagctttgataaatgttttaaggattatgaaaacttatatcaagtcttttccatctttacgatgaatggcgaacaactcgaaccgcaagatcaaaattgcggaccggtagcgggtgcaattcttgaaaactttcccaaagaagtggaggcggctaccagttactgcctttgggtgaatgatcctctctatcatggtagtgtccgttttgaagtcagaaagctggcggcagattccctctttttccagacgatgggaatcgaggtcttaagcggaactccggtgaaagatttagcccaaaaagatgtagtttacctgagtgaccgtttggcacgaaagatgttcgacacagagaatccgataggcaaggttatctcatacagtaaagagatagaacttacggtaaaaggcacctatgctgatataccggagaatgcgacggtaaggcctgaagcggtgatttctctgccgtcgatatggagccgcaaatggggaaattactcatggagaggtggtgacagctggctggcgttcatccgttttcgtcccggagccgataagtcggtagtgaatgcccggatagacgcaatgatacagaagtatcgtcctgcggaagatcaaaaagtggttggatataccgcttttgtaaaaccaatccgtgacgtatatcgtgataataaagatgtaaggcggatgcggaacatcatgactattctgggtattactattcttttcatcgcttcattgaattatgtgttgatttctgtttcatcactttcctatcgggcgaaagcggtcggtgtgcataaatgcaatggggcaggaaacatgaccatattgagtatgtttctttgggaaacagcgattatcattctgtttgccctgatcctgatgggattgatcttattgaattttcaggatttctttgaagatacggcagctgtcaagttaagcgctttgttcagcttggatcgtatttgggtacctttattaacggtagctgtacttttcgttgtgggtggggtattgccgggacgactgtttgcaaggatacccgttactcaggtattccgccgatacacggaaggtaaaaagggctggaaacgaccgttgctgtttatccagtttgccggtgtagcatttatttgcggactgatgtatgtggtgatgatgcaatattattatatcttgaataaagatttgggttataatccaaagcgtgtagtggtggccaatgccagcttcggtgaggaagaaaaaggaaattatgccttgaatgttttccggaatatgccttatgtggaatccgtgtccagtgccacttatcatcctgtctacggatatagtggaacgattattaatgatgaaagcggacagtcactattttcatcccgttattgcagtactttggatgattatccgaagatgatggggatggttctgaaggaggggcgtatgccccgtggtgatgatgagacagtcgtcaatgagacttttgccgagtggatgcattggggaaacaatatactgaatcgtacggtttataattcgggatacgtatgtaaggtagtgggcgtgatgaaagattatcgcatcggaagttttaccagcccgcaacaaccgttgctgcttatgcacaccaagaggtttggtgactgtatccatattcggttgaaagaaccttttgccgagaatcttctcaaactgaataaggagatggagagtgcatttcctgataagactatcgaatttcggtcgatgcagcagatgatcaaagagaattataactctgttcgtgttttcagtaatgctacgatgctggcggcaataacaatgttttttgtgatgttgatgggattgataggctatactacggatgaggttcgccgtcgttccaaggagatagctatacgcaaggtgaatggttccgaagcaaccggaattttggaactgctggtgaaggatgtgctttatgtagctgttgttgcagttttaatcggagtggtagcagcatggtacgtcaatagtatgtggatggatttgtttgccgaacatgttccgctcagttgggctgcctattttctgatagcaattgcaaatctgggagtcattgtggcatgcgtactttggaaatcatggaagattgccaatgaaaacccggtcaatagtataaagagcgaataaagaagaaataaaaagtataacaacataataaatgaacaagatgatacagattgaaaacattagtaaagtattccgtactaccgaagtagagacagtcgcattaaatcacgtgaaccttgaagtaaagggaggagagtttgtagccattatgggaccttcgggctgtggcaagtctaccttactgaatattcttggtttattggataaccctaccgaaggctcttaccgattactgggagaagaagttgccggactgaaagaaaaggaacgtaccggcgtccgtaagggcaaactgggctttgtatttcagagttttaacctgatagacgaactgaatgtctttgagaatgtagaacttccgctgacctatcttggtatcaaatcttccgaacgccgccgcatggtagaagacatcctgaaaaggatgaatatcagccaccgtgccaaacacttcccgcaacaactttccggcggtcagcaacaacgtgtggcaattgcccgtgcggtagtgactaatccaaagcttatccttgccgatgagcctaccggtaatctggactccaagaatggcgcggaagtaatgaacctgctgacagaactgaacaaggagggaaccaccattatcatggtaacacactcacagcacgatgcgagtttcgcacatcgtaccgtacatctgtttgacggtagtgtagtggcaagtgtaacggcataaaccggaacgacaatgagacaaatctattatagcatccgaaccttactgcgcgaacgcggcacaaatatcatcaggataatttctctttcgctgggacttactattggtattttactcttttcgcagattgcgtttgaattgagttatgaacattgttatccggaaccggaacgactggctattgcacgttgcctgaccactaaccttagcacgggggagacaatgggagacgacggcaacaattatgattacacactttttgatgtggttgcatctactttggcgcaggatatgcccgaagaaatagagtttgccagttgtgtcctcaccggacaagggatgagtatatattacgaagacaaattattatcggatgttaactatatatacgctgatacttgtttcttccagacttttggtatccctgtcttaaaagggaacccgaaagatatgatcatgccgggaagtgtgtttgtgtcagagcattttgcccgtgaaacgtttggagatgcggaccctatcggtaaaattcttaaagcagacaggcaaaatgattttactattcgtggtgtatacaaggatatgccggagaatacggtgctcactcacgactttgttgtctccatccatcgggatggaggatatcagggaggatatggctggaagggaaatgatgtcttttacacgtttcttcgcctgcgtaatgctgcggatattgacaaggtgaatgacaacatccaacgggtaatcgagaaatacactcctgcccagtatgatgactggaaaatgaatttcagtgtcatcccattggtgaagtatcatttgatatcttccgatgtgcagaagcgtttgatcatatatggctttctgggattcgctatcttctttgtggccatcatgaattatatgctgatatctattgccaccctaagccgtcgtgccaaaggagtaggagtacataaatgcagtggtgccagttccggaaatatcttcggcatgtttttggcagaaacaggaatccttgttatcttttccgtacttcttagccttctgctgatagtcaacgcacatgaaataatcgaagatttgctttctgtccgtctgtcctcactttttgcgtgggagacactatgggtgcctttgcttacgattgtgatacttttccttttggcaggtggcataccgggacggctgttttcgcgtataccagtcacgcaggtgttccgtcgttactctgatggtaaaacgggttggaaacgttcgttgttgtttatacagttcacaggtgtctcctttgttttggggctgttgctggtaacgctcctgcaatacaaccatctgatgagccgcgatatgggaataaacgttccgggactggttcaggcaggaacctggttgccgaaagaaacggtagagcatgtcaccgatgaactgcgtcgccagcctatggtagagggagtggctgttgccacaagcggagtaatcggacagtactggacacgcggactgatgagtaatgacggtaaaagaatcgctacacttaactttaattattgcagttataactatcccgaagtaatgggaataaagattatcgaaggcagcactcttaagaaacaggacgatttattggtgaatgaagagttggtacgtctgatgaaatggacagatggggcggtaggaaagaaactgaatgatatacagggtacgattgtcggtgtcttccgggatgtccgcaactatagcttcttttcaactcaggcacctattgtcttgataggatcggagaatgccaatcatgtatttgatgtccgtttgaaagagccgtatgatgaaaatctgaaacgtctgaacgagtttgccgataagacatttccgaatgtagccttgcatttcagttctgtagacggtatgataaaggatatatacaagagtgtatatcgtttccgtaattcagtctggatcacttcaagctttattctgctgattgtaataatgggattgatcggatatgtgaatgatgaaacgcaacgtcgaagcaaagaaatagccatccggaaagtgaatggagccgaagcctctcatattttgcgtctgttgatacgcgagattctgtatgtctccgcttcctccatattgattggtaccattgtttcctatttcgttggaaaggcatggcttgaccagtttgccgaacagatttatatgaacccgttattgtttgtgggtacggcgctgtttgtcttattgctgatcgtagtttgcgttgtgttgaaagcgtggcacatcgccaatgagaatccggtgaaaagtataaagagcgaataagaatattattatcttttaggcacggattaacgcggcttttatgagatgcattcattgcagaagtaatcttaatccgtgtattcgtgcctaaatatttttcatactgatatatcttttagcatagcgtcctttttgctttattccgccactttatctgctatcggatgttctttcgatactttctttatataaatcatcagactgataactgccgtaataaatgctaaagagtccgataccggcagactgatccatattcccttcagtccccaccaatgcgggaataacaacaggcaaggcagcaaataaagcaactgccgcgtcaacgaaaggaaaatacttatttttactttgcctatactttggaagaagttaccgattacaatctgtgctcctacaaacgggaacataagtacagtcaaccgaagaccgtccaccgcaagtccgattaactcatcactatccgtgaagactgccgatactgcatgagggaaaaactcgcaaatcagaaagccactgcttgtaatcactacaccggaaataattcccagctttagcgtctgtttcacccggtctatcttctgtgctccgaagttgtagcctacaatcggctgcatgcccatcgtcagtcccaatacgatcatgacataaagcgtcagcaatcggttgatgattccgtaagcaccgatagccatgtcgcctccatgttcctgcaaactattattaatcacgataacgatggcacaagcacagacattcatcaggaaaggagacatgccgatagcgaaaatactctctacaatccttcctttcattttccagacctttccctcaaaatgcaccgtactgtctttcttgcagaagtggctcaccacccataccattccgatcagctgtgagataaccgttgctgtagccgctccccgcattccccattcaaagtgaaagataaagataggagcgaggatgatatttgctactaccgttaccatagaagtaagcatcgctttcttcggatatccggtggcacgcatcacattattcaggccgatcatcgtgtatgtgatgggagttcccaataaaatcacctgcataaaactccgtgcataaggcagtgtgtcgggactggcaccaaagaaagtcaatatatcatcaagaaagataaaagacaggataccgaaaaagaaagaatttgtgatacagagcatcagcgtatgtgacagaatctccgtagcccctttcatatctttctgtcccaggcgaatagaagcgatggtagaaccacccgccgaaacgagtgtacagaaagcaacgaccagattcatcagaggaaagctcaccgccagtccggcaatagccatcgcacccacaccgtgaccgatgaagatgctgtcgatgatattatagatagacgtgattgtcatcccgatgatagcgggaatggagtattgcaacagtagcttaccgatgctttcttttcctaatatgtgcggatcgtttttgctcatgcgctcgtatggattgttggatgaaaacgaatgttacgtttttttaagtggggcaaaggtacgaattatttgcctgattcgatgattattcggaactttgcacaattcaatacacaaggtttaacgttttaggtaaaaagaaagattacgtatggatacaacaaagacaattgcggcactgttcgattttgatggtgtcatcatggatacggaaacacagtacactgttttctgggatgaacagggacgtaaatatctgaatgaagaagacttcggccgtcgcatcaagggacagacgctgacccagatttacgagaaatatttctcggacctccccgaagctcaacaagagattacggccggactcaatatttatgagaaaagcatgtcctatgagtacatccccggtgtagaagcttttattgccgatcttcgtaaacacggagcaaaaatagccgttgtaaccagctccaacgaagagaagatgcaaaacgtctataacgcccatcccgaatttaaaggaatggtagaccgcatcctgaccggagaaatgtttgcccgttctaaacccgctcccgactgtttcctgctcggtatggaaatattcggtgctactcccgaaaactcgtacgtgttcgaagactccttccacggtctgcaagccggaatgacttccggtgccactgttatcggtcttgccactaccaatacaagagaggccatcaccggaaaagcacattatataatagatgacttttcggaaatgacctttgaacacttattggccttgcaccgttagttctttcttattatcttcttaatttgtctttttggccgccttctcattaacttggggaggtgtttgaaaggattttttctttttctttctcacttatgaaagaaatgttataactttgccgcaatttttgatggcgttgatgccttatttaatttctagttttaatttaaaatttaagaaacatggctggttatatatcagatgacacaagaaaggtgactactcatcgcctggttgaaatgaagcaaagaggcgaaagaatatctatgcttacttcttatgattacacaatggcacagatcgtagatggtgcgggaatggacgtaattttggtaggcgactccgcttcgaacgtgatggcgggtaatgtgactacattgcctattactctcgatcagatgatttatcacgctaaatcagtagtacgtggcgtaaaacgcgctatggtcgtagtagacatgcctttcggttcctatcaaggtaacgaaatggaaggtcttgcttctgccatccgcattatgaaggaaagccatgccgatgctttgaaactggaaggcggagaagaaatcatcgatacggtgaagcgtatcatcagtgcgggtattccggtgatgggacacttgggactgatgcctcagtctattaataaatacggtacttacacggtacgtgccaaagatgacaacgaagctgaaaagctgattcgtgatgctcatcttctcgaagaggcaggctgctttgccatcgtactcgaaaagataccggctactcttgcagaacgtgtggcttccgaactgacgatacctattataggtattggtgccggtggtcatgttgacggacaagtattggtcattcaggatatgcttggaatgaacaacggattccgtccgcgcttcttacgtcgttatgcagacctgtatacggtgatgactgacgctatcagccgttacgtatccgacgtgaagaattgcgacttccctaacgagaaggaacaatattaaaacagtatatggcagttaaattgtggacagttcattttatgcggatatgcgtagctaatttgctgttgtttatctccttgtatatcttgtttccggtactttccgttgagatggcagaccgtctcggagtaccggtggcacagacaggagtgatctttctttttttcactttaggaatgttccttatcggtccgttccatgcttatctcgtagatgcttataagcgtaagtacgtatgtatgttctcttttgccacgatggtggcagcaacggcaggatacgcctttgtgacgaacatcacggaacttatcttgttgagcaccgtacagggactggctttcggaatcgctaccaccgcaggaatcacacttgccattgacataacgaacgctacacttcgcagtgccggaaatgtcagtttctcctggatggcacgtctggggatgattataggcattgttctgggtgtctggctttatcagagctattcctttaaaaatctattgtccgtatcggtgattaccggagtagcaggtgttttgatggtatccggagtgtatgtgcctttccgtgcaccgattgtgaccaggctttattcattcgatcgctttttgctgttgcggggatgggtgcctgccatcaatatgattctgatcaccttcgttccggggttgttgattccgcttgtacaccgtttccttaacgattccgtatggggaagcagtggaatccctataccgttctttgtcggtacgggcatcggatatcttgcctccctgctgctggcgcgtctgtttattctgaaagaaaaaactttgcggctggtgctcgtcggcatcatactggagattgtagccatcactctactggcctccggctttccggtaggcgtaccttccatactcttgggtttgggactggggttggtgatgccggaatttctggtcatgttcgtgaaactgtcacatcattgtcagcggggtacggcaaataccactcatctgttggccagcgaagtcggattcgcatccggaatagctgttgcgtgttacttcgatttggaagcggataagatgctctatacaggacaggtggtagctgtgattgctttgattttctttatactggttacatatccatattataagagaaagaaagtgagataaatcgtttcgcactatttccgtgacatgattgtctatcataaataaaaagactggcgttatcctgacggagataatgccagtctttttattaaagacctgtcaacagatttgctgttagcatagagtgcttagtttctgcttacctgtttaactcccttcactgtccgcagctttttgatcagcgcttccagtcgtccggtatcacccaccatgaccgtaagcgttccggagaatagtccgtcgttggaattgattccgatggaccgcagactgattccattctctttggaaatgatggaagtaatattggtaacaatgccgatatcatcatgacctactacgcgcagcgtaatcggatactgcgtaccgactgacttgccagcccaacgcgctttaacaatccggtatccgaaccgttcgcgcatctgattggcattcggacagtctgcccggtgaatcttgatacctccgctcacggttacaaatccgaatacatcatccccatagatcgggttacagcatttggccagtttaaattccagtcctttcagattctgatcaatgactagtacatcctcttttgaactaggttcttcctgagttgcctgcaaattatatccttcggcactgcgatacacaatctcatcgtgcgtgtcattgtcccgtctctgctgttcaaggtatttgtccagaatgtcgttgacatccaatgtctcgtcagcaatcttctgataaaactctgtcacatttttaaagcccagccgcttgatcaggcgcatcatggtggcttcgtcatactccatcttccggttcttgaacttccgttccagtgtctctttggcgaaatcgtgctggcgtgctaccatctctttgagtgcctgccgtatcttggtgcgggctttggaagtcgtcacgatgttgagccagtcctgtttgggagtctgggtattcgacgtcatgatttctacctgatcaccgctgttcagtttctgtttgagctgtacatttttgccgtttactttcgcaccgatacacttgcatcccagtttgctatggatgtggaatgcgaaatcgagcacagtagctcctttggcaagtttgaataagtctcctttaggcgtgaatacaaatacctcatcctcgtagaggtccattttgaactgatccatcactttcagtgagtcgttatccgcattttcaagcgcttcacgtaccgaagtcagccattcgtccagtcctgtttcccctttgatacctttgtatctccagtgtgcggcgagtccccgttcagcgatctcgtccatccggcgggtacggatctgtacttccacccatcttccttccgggcccatcacggtaatgtgcaacgattcataaccgttgctctttggaatcgagagccagtcccgcagacgtttcgggttcggctgatacatatccgttacgatagaatagacctgccagcattcctgcttttctttggccgggtccggttcggaatccagaatgatacggatagcgaacaagtcatagataccttcaaacggagtcttctgcttctgaatcttattccagatggaatggatggatttggtacgtcccttgatgtcgaacttcagtccggcttcctttaccttcttctggataggatcgatgaaagaagcgatatacttgtcgcgggatgctttcgtctcgttgagcttctcctttataaagtagtaggtttcccgctgcgtatatttcagcgacaagtcttccaattccgatttcagcttgtaaagtcccagtttgtgggccagcggagcatataggtaagcagcttcgttcgctactttcacccggtcttcctcgttgcctgtatccttgatttggcgcatgatgttcacacggtctgcgatcataatcaggatgacgcgcatatcttcggcaaaagagagcaggagattgcggaaattctccgattctatcgccggacttttggagtacagttcgtttgttttcaccagtcctttgatgatactgcctacatcttcgccatattcggcattcacttcttcgatagacaggatatgtgccttcactatttcgtgaagcatgatgccgaccagacacgaacctttcatgccgatttcttcggctacgataactgccgtttgtaaatctctgatgacgggattcatcccgaagttattgcgttgcagcccgttacactgggcggctttgataagatgtttctttaatttttggcaatccctccagaaaatcgtatctccggcagattgcaacagatgcctgtagagtgaaaaaagctccttcttttcctccgatgtaaaaaagtcgtccatattcaatcttgttaattcgacgtaaaattactttttttcccggttattcggcaagaagtaaataacattttgtatttttgggcatcaattaataaaaatagatattatgataacgacacaggacaaagagttgcttgccaagaaaggcatcacggaggcgcagatagcagaacagctggcttgcttccagacgggttttccttatttgaaactggacgctgccgcttccatagaaaaaggcatattggctcctgacgcagaagaaaagaacgcatatctggctgcatgggatgcttataagaatacggataaaatcatcgtgaagtttgttcctgcttcgggcgctgccagtcgtatgttcaagaatctgttcgagtttctgtccgcagagtatgacaaacctactacaaagtttgagcaggcattcttcgacggaatcaaggattttgctttctatgacgacttgaatgtagcttgtcagcgtacagccggaaaagatattccggggctgatggaagaaggtaattacaaagccgtagtagctgcccttctcgaaactgccggactcaactacggagcacttccgaaaggtctgctcaaattccataaatatcccgaaggttcacgtactccactggaagaacatcttgccgaaggcgctatgtatgcagccggaaaaagtggtaaagtcaacgtacacttcactgtctctaccgaacatcgagaactcttcaagaaactggtggaagagaaagccgaagcattcggcaaacgttacggagtagactattacatcaccttctccgaacagaaaccaaataccgacaccatcgctgccgatatggacaaccagccgttccgagacaatggtaaactcctgttccgtccgggtgggcacggtgcactgatcgagaacctgaacgatctcgacgctgatattatcttcattaagaatatcgacaacgtagtacccgataaactgaaagccgacaccgttacttataaaaaactgattgccggcgtactcgtgtccttgcagaaaaaggcattcgaatacctcgaactgctcgacagcggaaagtatacgcacgagcaaatcatggaaattctccaattcctgcaaaaacaacttttctgcaagaatcccgaaacgaagaacctcgaagatgccgaactggtgatctacctgaagaacaaattgaaccgtccgatgcgtgtatgcggtatggtgaagaatgtaggtgagccgggtggcggtccgttccttgcttataacagtgacggaactatctcactgcaaatcctcgaaagctctcagatcgacatgaacgatcctgccaaaaaggaaatgttcgaaaagggtacgcacttcaatccggtagacttggtttgtgccgtacgcgattataaaggtcacaagttcgacctggtgaaatatgtagataaggcgaccggcttcatttcttataaatcaaagaacggaaaagacctgaaagcgcttgaacttcccggcttatggaatggtgcgatgagcgactggaacacagtattcgtagaagttcctcttaccactttcaatccggtgaaaacggtgaacgatctgttgcgtgaacagcatcagtaggatttaaaacaagattgggtccagtctgtcattcttcctcctccgcggtcgtccgaatggcagatacagacaaatgtctctcccaatcattataattactaattaagtaaaagcaaaatctgagaggctgactaaaaagtcagtactatcttaaatctcctccttcccgaaggaggagatttaagatactgccgacttttagtcagccctagtgtagatacaaccgactttttagtcactacttataataaaaagagtatttaggatgaatcagatagaaaagatcattgacattgcaacatggaacagaaaagagcattttgaacatttcagcgcattcgatgatccctttttcggagtgacagttcatgtagactgtacccgttcttatcaggaggctaaagacaaaggcgtctccttttctcttttactattacatcgtatcatcactgccgcaagcaaagtcgaggaattccgttaccgcatcgagggcgacaaggtagtctgctatgacagtcttcttcccgaagcgacagtagggcgtgccgattatactttttcttttgccgcctttgagtacgatcccgatgagctcacttttatccgtaaggcgaaaaccgaaatggagcggctgcaagccaccaccggactgaacaaaggaggaactttccatcccaacgccattcactattcggctgtcccatggctggcctttacagatatgaaacacccttcgaacatgcgttcgggcgatagcgtccccaaaatatctaccggaaaatactttcgggaaggagagaagctgatgctccctatttccgtcacttgtcatcacggactgatggatggttatcatgttgccaagtttattgagacccttgatttatgaaaccgtcaggaactgaagactaacaatgacggcactatgagaaacaagaccctgagatggaaaaccatcgctctttgttccatcatgttttgcctgccggagattcctttggcagggcaggagtcttctggttttatccatcgtttggggatagaagcccgtccgcagtatgtgtttcctaccaatcccttcctgcaaggagagaacgaacgctggaaaccgattcagacatcgtttgccgcccacttgaaatactcgttcaagtttcgtcccaatacttgtgccgaccgtatttacggtggagcttatcagggtatcggcgtatcccttaccacctttggtgataaaaaacagttgggcgatcctttctcattctatgtatttcagggagcgcggattgcccgtttctctccccgtgtctcgctcaattatgagtggaatttcggtctgtccgccggatggaagccatacgacaattattataattcctataatggtgcggtcggctcacggatgaatgcttatatcaatgccggagtttacataaactgggcgttttcccgttacttcgatctgattgtcggaggcgatttcacgcacttctccaatggtaacactaaattcccgaatgccggaatcaatactgccggagccaagatcggactcgtctacaatttcaatcgtacggaagaagacctctcgaaatcactctaccagcctgtcatcacccgttttccccggcatatcagttatgatgtcgtgctgttcgggtcatggcgtcggaagggagtgtgggtaggagagaagcagatcgcatctcccaatgcgtatcccgttgccggattcaattttaccccgatgtataatctgggttataagtttcgcgtgggagcttcactggacggtgtctatgatggcagtgccaatgtatatagggaagatgtaattgtagaatatggaagcagcagttctaaacgtgaattcctgaaaccgggcattcagcatcagctggccttgggactttcgggacgtgcggaatacgtgatgccttattttaccatcggtgtcggcatgggagccaacgtgctcagccgtggcgatatgagaggcttttaccagattcttgcattgaaaatagccgttacccgcagttcctttcttcacatcggatacaatttgcagaacttccagacgcccaactatctgatgctcggactcggtttccgtttccacaataaatatcctaaggtacgtcattaataaaaagaaatatactaattttgcatcactaacataaaacactcaaaataatgaagaaaatattgttactcggttccggagagttaggaaaagagtttgtgatctctgcacagcgcaaggggcaacacgtcattgcttgtgattcttatgccggagcacctgctatgcaagttgccgatgaatttgaagtcttcgacatgctggacggtgaagcattggaacgcgttgtcgaaaaacatcatccggatatcatcgttccggagatagaagccatccgcacagagcgtctctatgactttgaaaaagaaggaatccaggtagtgcccagtgcccgtgccgtcaacttcacgatgaaccgtaaggcgatccgtgaccttgccgccaaagaactcggcttgaaaacagccaactatttttatgccaagaccctggacgaactgaaggaagcagccgccaaaatcggtttcccttgtgtcgtcaaaccgttgatgtcttcttccggcaaaggacagtctctcgtcaagagtgccgacgagcttgaacatgcctgggaatacggatgcagtggcagccgtggcgatatccgcgaactgatcatcgaagaattcatcaagttcgacagtgaaatcaccctgctcaccgttacacagaaaaacggacctacgctgttctgtcctcctatcggacacgtacagaaaggcggtgactaccgtgagagtttccagcctgcacacatcgaccctgcacacttgaaagaagccgaagaaatggcggaaaaagtaacccgtgccttgactggtgccggactttggggagtggaattcttcctgagccatgaaaacggagtctacttctccgagctttctccccgtccgcacgatacgggcatggtgacattggcaggaacgcagaatctgaatgagttcgaacttcacctgcgtgccgtactcggtctgcccatccccggcatcaagcaggagcggatcggtgcaagtgccgttatcctttctccgatagcgagtcaggaacgtcctcaatatcgtggcatggaagaagtgacgaaagaagaagatacttatctgcgcatcttcggcaagccgtttacccgcgtcaaccgtcgcatgggagtcgtactttgctatgcaccgctgaactccgatctggatgcgttgcgtgataaagcgaaacgaatcgccgagaaagtagaggtatactaaataaaaagaatgagagtgagtcaaaagcaaaaggatagtgaatattgcttttgattctctctcatcatctcctcttatataactaataatgaaaaacatgaaaaagactaaactattggcagctactgctatgctattactgacttcctgttcacctaaagtggtcactaacattgtaagaacctatccggatattattccggcagattcggtctatgtcatcggtttgggagaaaaagtgcccaatacagccgagactatcgggcgtgtatcagtagtggatcggggtacttctacgaattgccgttatgatcaggtattacatcttgcacaagaggctacaggaaagattggtggcaatggactcgccatcactaatcaccagaaaccttctttttggggaagttcctgtcatcagatttccggactgatgctgcggttgtcggataaaagtgtggatacactgaaaacaaatcctgtacaagacgtaatagatctcgacctggttattgctaaagactatgcagaaagcagaaaagcgcctgccaacacgtttgaagcgagcttcggatatggatgggtgatcagcaagatttatgatatcaacggtagggcgttagattcgaaaggaggagttgaatggaagctcgcttacgaacatgtctggaacggtgggatgggaatcggacttcaatatgctggtttcaagaagtcattctccggtggcgacatgatgttctcctatatagctccggagtgggtaagccgtacaaaatttgacagatggatcttaaaatcaggcgttggtgtcggcgttttcctttatcatgatcctttctacaatgctgccggattcggccttcatgccacattaggatttgagtacatgctttcatctaattggggactcagcttgactctgaacgggatcggtggaagtatgcccaaacaggactggatgctgctgaaagaagacgaacgttgtggaatcacccgctttaacctgctgggtgggctgcgctactacttctgatgataactccttctttctaggaagaatatcaacgtttatactgtacttagatttataaataaagagagaggacagaagtctgaacctgcatcctctctctcacgtttatgaaattgttatttctctgatcttacagactcatcgcattaccgcctacaatacccagcactgccgaagccactgcgatgactactttcaaaatggtatcccaaagggatctcttgactgccataactctacacacctcctttccgactctttatatgattgattactaagtgaatcattaccgaatgatcgattactcccgataactttcctcctttacctcaaagcacgggcacgccttgatccactcctccggctcaatctctccattaccgttgcgatccggcgacaagtcgcgatgaccgcacacccggcaaccggggaatctctcttgcaactgatgcaccagcagccggagcgctgcccgctgttccggtgtccgtgtgtccgccgggcgtccccggcagtccaggccgccttcgtagcaaattccgatactctccgcattaaaacctttcgcatgtgccccgatccgttccaccggacgggtaagatgcgttgttccatctttgcggatatagtaatgataacctgtcccgttaaatccccgccggcggtgcatcgtatccagatcaaaagccgtcaactccttgtctgcccgcgttgcagaacagtgaatcacaattaaatgaatcttcctcataaagccactaattctaactatcaatccctcgtacattgattaccaactctcaactctccacttcttacactgtcgggtccggagcttcctcgtcgcctccgccgccttcgtttccactgccaccggggttgttgtcctctcctgatccgtcgcctttcttctttttcggggcttcgaggtcgagaaactcgatcttgtcaccggcacgggtagacgtcaggttggggcggacgctgctggaagggcggaagttgatctgtatagatttgatattcttcaccgtacactcttctttcgtggttgctcccagcgtatgggcggataggctgaatacaccgaagtctctgatattgaccgattttccgtcgaagagcgccgctcgcattgcctccacatagttggtcagtacgctttggatgtcgcccagggagagggaactcttgtctttcatgatgtaggcgatgccgtcaaggtctacactttggcccatcgtcaccagttgggggtggtacttcagcaccccgtcaatttttcgcgggtctttacgacccattcttttaaatggtattgccatgatgataaattaaagatttagaaaaatataaattaataattactgattgctgtcactcgatcagtgtcgggagagagaatgagctctgtttctttctttcgatgtgtcaaaggtagcctattattaagccatgagaatacgtactttatcgtacttcgtcgtactttctttcagaatgtatttactttctttctgattgattttattttacttgtttgcttgtgtgcgcaaatatgttttagtatatttgaagtacgaaagaacttaaaaacaacgatatgaaaacagaaaaagaagaagcggaagaagaaccgtttgtcatccgtccgtatttgaagtcggagctggctcacaagtacaatccacatttgccattgatttatgccatgcagaaactacggggatggatcagaaataataaagaactttatgacgctatgtatagcggtggagaaggaaaaaacgatcatgcttatagcagcagacaggtgaggctgatcgtgaagtttctcgatgagccgtgaatctgtttttcgatgagtcgtgaatctgtttcttgataagtcgtccgtctgtaaggaagaaacaaattagctattagcatatttcgattagctattagctaatttgtttttgctaatagctaatttcgatatgctaataagacttattgtttttttcttgtgacaatgaagtaaaagtcacgaatttcccctttcaaagtccagtaaagtccagaaagtccatattagattttcagaatatacgaaccgtgacctaacttgctgattctccctgctttaatgcctttattcaataagtagtaaacggtgcttcttgagaggttcaattcctctcccaaagcacatgcttctttggctgaaaaactctttttgagtttcgtcagaagtcgcgagagattatcgggcgattgtaatggtttcgtatcttcggcagagctttttaccgaagtactgaccagtttactatgttcgaagcaacacagcacgatggcgagcgctgctttgaaatgcgcgtccgagcagtatacttcgggtgtttccattctcatggttcccttgtcgatggcggagaaaatgcagcagatgcgtgccgttatcactccataacgtttcaccacccccagcaggtcatcattacctaactggtccgtatctttgagcagttgcgtgaatacccggttgaattcttttttctgtgtatctgtcagctttacttccgtaggagaatctttcagaaacaatgccatctgtgcgaagcgcatggacaactcgttgaagagatcgtccgcccgcaccttttcctccgcgaacacatcctgccatgctgccggaagtctgaaagtattgatcagaaagcggttgtacagccctgtctccatggtcgggatgaataaaatgaggctggatggagtaccggtgagaaaagccgacagggagggatattccactttcagcggatgtcgtccgttgatcttgtaggacgaactgatcagttcgtgctcgaatgccttgcagaggatatcgtcgaagtgtccgtaatcttggttgcgggctgtgctgacgctgctggcttcggtactggtgagcaaggaagaacaactttggttgttgatgaggtgagtgatgagctgtgcacggctgatgtcggcagggatcagcggaaatgccagcttcggctcctccggttcgtccggcaggttggtggcggcagtattctttttgcgtatcgcctgcaaggagagggtgtagtccctgagtgctttcttgtattccttttcgatcctcagactctgcttctcccaatactcacaatagtgcttgtgcaggcgtatgccatagccgatgaggttcttgttggcaccggaggaagctacgacgatacagtagatgttgggctgataattccgtcggttgtagcggatgtttacgctggggagcatgctgcttatcgtggtaatacatgacaacaagagtccgtccctttcacgctcatctcttgcgatggagacgcactccttgaagatggcgggaatgagatcgtaaatttcgtcaggaaaggtcggagtctgctctctgagctcttctccgatgatttcatcctccttttctgccggattttcgttttctgaaaatcctataacggacttttggactttactggaatttgaaggaggattttcgaagctttccgtctctgccgcagtcattatattctggtaagctgattttacagtacgtgcgatttcgggttcacggaagttgtcttcttccaaggtgcgaaccaattcggtggtcagttcgttacggtcgatgccgcgtttgcaggcagcgcagctgagccggaaaacggttccgttccggtcgcccgttgcggcagggtagagggtgaggtaggactgtacgaagggagcggcggaaatccggttacccggcatcgcaggcggatgtccgttggagaaagaggtgggagtgcaggtggtgcggggagcggaagtgacgggagcgtaggtgacgcgcggagtgagtgcaccgttcggcagaaagtcgttgacggcctttgcgtcaccgttgtagtatgcgtccgggtcgtatgatccgaagcagggatgggtgatatccttgcatttcccgtcgttctctacgccgagaacggtggaaacgagctttgcagtcgcttcataaatggcaggataatcgtttactccatcgatatctatacgaatgaacaacttaacaccacgtccggagatgctgataaacgctcccaacacgtattcgagcaggcaggcacgtacgaaaatatcctttgtctgttcgtccgtatggtcgatgtcgatgcagagtgcgagtgacagggaggtaaggttgttttttgcgtgtccattcttgcatatgcctgcggggatgacacatgccatgctgtctttgatggtttgcgcgtcgtgttttcggtcttttgccagacagctgcggtggccttccgtaggcactttccaatgtccgttgcgtaccattgcgaaaaaatcttcaaaagttatagtcgtgggagttttactccaagtgttgataaatagtgacacttggtacatgtgctttctcatttgaaatataatatataagttaccggaagcgggtggtgtagttatcacgggcttccggctgcgaaggtaggaacttctctttttttaccaaatcgattattaggactgatttctgttccaatcgtcccattggtctttcaccatctcctccagttttcccagacagcttttataggctatggcatgcttcggagagcgttcgtcgcggatttcgatgcaatggaacagccctttcagtacatccggacagcgtggcatcagcggtatctgcttgatgatccgttcttctttgttgcactctttgatgtctttatcctgtacggatttccaaagaaactgttgcttgaaaatctcttttgcaaggatttcaagtaattcattttgagtgaataagatggggaatccgggtaggtgacattgagatatatcatctactgtcaacggattgcctgctttgtctaccattgttacgtttaacgtaaagttgccgattttttcggcaaaagccaaaaggttttttttaccataatttttaggattaataatgcagcaaatttcttctttttttatcagaagagtgttttttgcttcttattttttctgctgacatttaacaaagtggcaaaattaaggaatttataattttcttgccgaaaacttttccgcttcaggcaaatggggagtgtttaataggatgtacgtgcccggatataaaactagttgcatatgctactattttatcactcgtttaagtgtttgaatattaccgttgaatgggaaaacttgatattaagtcatagttttaatgatattttataactaacaggcttattttactatacaatcgtaattggaatgttccgatattggtctgtttgtagtctttgttggcctaacaagtgttattgaacgacaaataatgaaaaaggaagaacaacgatgctaatttgtttctacatttgcgcggttgtttatttaactattttgttaaaaagaaatcgggcatgattgaacaaaagctaaatttaactgtttactatagtagattaaagtagataaaacgcgaaacgttccttgtcatgctactaaaattcgataggtaaagaaagaataatataaataaagattgcttatgtcacagattatcggacatatctcacaggtgatcggccctgtggtcgacgtgtactttgaaggtacggacgcagagttaatgctgccaagcattcacgacgcactggagataaagaggccaaacggcaaaatactggttgtagaagttcagcaacacatcggcgagaatacggttcgtaccgtggctatggacagcactgacggacttcagcgaggcatgaaggtgtatcccaccggaggcccgatcacaatgccgataggcgaacagattaaaggacgactgatgaacgtagtgggcgactctatcgacggtatgaagagtctcgaccgtacaggcgcatattccatccaccgtgatcccccaaagtttgaagatttgacaactgtgcaggaggtactcttcacgggtatcaaagtaatcgacctgctggagccgtatgccaaaggtggcaagatcggactctttggcggtgccggtgtaggaaagaccgtacttattcaggaactgatcaataatattgccaagaaacataacggattctccgtatttgccggagtcggcgagcgtacccgtgaaggtaacgacttgctgcgtgaaatgatcgagtcgggcgttatccgctacggcgaggctttcaaggaaagtatggagaagggcgactgggacctttcgaaagtagactataatgaactggaaaagtcgcaggtatccttgattttcggacagatgaacgagcctccgggcgcacgtgcctctgtggcattgtccggactgacggtagcggaatctttccgtgatgccggcaaggaaggtgagaaacgcgatatcctgttttttatcgataacattttccgtttcacgcaggcgggttcggaagtctcggctctgctgggacgtatgccttctgccgttggttatcagccgacacttgccacggaaatgggtgcgatgcaggaacgtatcacttccacccggaaaggttctatcacctccgtacaggcagtatatgtgcctgcggatgacttgacggaccctgctccggcaacaaccttcagccatctggatgcaacgaccgtgctcgaccgtaagattacggaattgggtatctatccggctgtcgatccactggcttctacgtcccgtatccttgacccgcacatcgtgggacaggaacattatgacgtagcacagcgcgtgaaacagattttgcagcgcaacaaggaattgcaggacatcatctccatccttggtatggaggaactttcggaagaagataaactggtcgtgaaccgtgcgcgccgtgtgcagcgtttcctttcgcagccgtttgccgttgccgaacagtttacaggcgttccgggcgtgatggtaggcatcgaggatacaatcaaagggttcagaatgattctcgacggtgaggtagacaacctccccgaacaggctttcctgaacgtgggcacgattgaagaagcgatagagaaaggcaagaaattgctggaacaagcgaaaaagtaatcgaaacaacattccatgatgaaagaattgcatttaagtatcgtatcgcccgaaaagagcgtattcgacggagaagtgaagattgtcacactgccgggaacggtaggatcgttttctatcctgccgggacacgcgccgatcgtctcgtcattgaaagcgggaacgttgggttataccacgatggacggtgaggagcatacattggatattcagggtggttttgttgaaatgagtgacgggacagcttcggtgtgtgtctcgtaaggaagacgagatggataatatacagcagaaaaacacaacgacatggtgaacattagtaagactaaacggaattttatcgcactgaatacgctgtttgctatactaagcggagcagcgggagcagtgattttacacatagccttgccggggcattatttcggaggatatccgtttataccggtatatttctatatcttcggtttgtttagtatttatatgttcgatgcgtgtcggcggcatgctccgcagaagttgtcgctgctgtatctggcaatgaagatgataaaaatgattctctcgctgattctgctgctgatttattgtctggcagtacgcgaagaagccaaggctttcttgctgacgtttatctcgttctatctgttgtatctgatatatgaaacgtggttcttcttctcctttgaagtgaacctgaaacggaaaaagaaaaataagaataaaaatgaaacagttgcgtaacatagtagctccgatatttctgctctgcctgatgttggtagccggtctgccggtcttcgcgcagacacaggaagatgtgactccgcaggagcagaaagagaatacggtcgatgtgaaggagatcgtgttcgggcatatcggcgactcatacgaatggcatattacgacgtggggtaaaacgcacattactataccattacctatcattgtttatagttctactacaggttggcatacgttcctttcttcccgtctcgctgagaatggaggcacttatgaagggctctccgtcgcccccgaaggaagtaagtacgaaggcaaactggtggagtataatgcagccggagagcaggttcgtccgtgggatatttccattacgaaggtgacattcgctttgttgttcaacagtgtgctgctgctggttatcgtgctgagtgtggcgcaatggtacaggaagcgtccgcagggagcattggcaccgggtggttttatcggattcatggaaatgtttatcatgatggtgaacgatgatatcatcaagagttgtgtcggacccaactaccggaagtttgcaccgtatctgctgactgcgtttttcttcattttcattaataacatcatggggctgattccgttcttccccggtggtgcgaatgtgacgggaaacattgccatcactatggtgcttgcaatctgtacgttccttgcagtcaacatctttggaacgaaacattactggaaagatatcttttggccggatgtgccctggtggctgaaagtgcctgtaccgatgatgcctttcatcgagttcttcggaatctttacgaaaccgtttgccttgatgatccgtcttttcgccaatatgctggcgggacacatggcgatgctggtactgacttgcctgatctttatctcggcaagcatgggacctgcgctcaacggtacactgacggtagcttccgtactgttcaacatttttatgaatgcgcttgaactgttggtagctttcatccaggcatatgtattcaccatgctttcggccgtatttatcggactggcgcaggaaggtgcaaaagtaaaagcagaataaacgcgaagagagagcaaataaataaacgagaaaataaaccattttaaaactgaaaattatgttactatcagtattgttacaagccactgcagcagcagtaggagtaagtaaattaggtgcagctatcggtgcaggtcttgcagtaatcggagctggtttgggtattggtaagattggtggttcggctatggaagctattgcacgccagccggaagcctcgggtgacatccgtatgaatatgattatcgccgccgccttgatcgaaggtgtggctctgttggcggtagtagtatgtctgctggtattcttcctgtaatattaaatagatatgtcattactattacctgatagtggcctgttgttctggatgtttgtcgcattcggggttgtgttcgtgatattagcgaaatacggtttccccatcatcatcaagatggtggaaggccgtaaaacctatatcgaccagtccttggaggtggcaagggaagccaacgcccagttagctcatttgaaggaagagggcgaggcgcttgtggctgctgccaacaaggaacaaggacgaatcttgaaggaggcaatggaagaacgtgacaagattgttcacgaggcccgtaagcaagcagagatagccgcacagaaagaactggatgcggtgaaacaacaaatccagatagagaaggatgaagcgatccgcgacatccgtcgacaggtagctgtgctttctgtcgatatcgccgagaaggtgctccgcaagaaccttcaggacaaagaatcccagatgggaatgatcgaccgtatgctggatgaagtattaacccctaataagaactaaggaagatggaagtcggagtactctcaatgcgatatgccaaagcgatgatcgaatacgctcaggagaaaggtgtggaggatagactctacaacgaattcttcacattgtctcacagttttcgtgtccagccgggactgcgcgaagtgcttgataatcctgtggtgtcggtaaaggacaagttggcgctgatatgtacggctgccgatggtaacggtgaatccagcagagagtttgtccgtttcatcacgctggttctgcgaaacaggcgcgaaggctatttgcagttcatcagcctgatgtatctcgatctttaccggaaactgaaacacatcggagtaggcaaactgattacggcagtcccggtggacaaggagacagaaaaccggatccgttccgcagcagcacatattctgcatgcccaaatggaactggatactgtgatcgatccctcgatagaggggggcttcatcttcgatatcaatgattatcggctcgatgcaagcattgccacgcagttgaaacgagtgaaacaacagtttattgataagaataggagaattgtataatgtctgaaaatataagagtaagcgaagtatccgatatattgcgcaagcagctcgaaggtatcaataccaacgtgcagctcgacgagatcggtacggtgctccaggtaagcgacggagtggtacgtatctacggattgcggaacgccgaagccaacgaattgctggagtttgacaacggcatcaaagccattgtgatgaacctcgaagaggacaacgtaggtgccgttctgctgggacctaccgacagaatcaaggaaggctttatagtgaaacgtaccaagcgtatcgcctcaatccgtgtaggtgaaagcatgctgggacgtgtcatcgacccgctgggcgaaccgctcgacggaaaagggctgatcggcggagaactgtatgaaatgccgttggaacgcaaagcgccgggagttatctaccgtcagccggtaaaccaaccgttacagacgggcttgaaagctgtagacgctatgattcctatcggacgcggacagcgtgagctgattatcggcgaccgtcagacaggaaaaacttccattgcgattgatacgattatcaatcagcgcaataactttctggcaggtgacccggtgtactgtatttatgtagctatcggtcagaaaggttctaccgtggcttctatcgtaaatacgctccgtgagtatggagcgatggattacacgattgtcgtagccgctacggcaggcgatccggctgcgttgcagtattatgcaccgtttgcaggagctgccatcggtgaatatttccgtgataccggccgccatgcgctggtggtttatgatgacctttccaagcaggcagttgcttatcgggaagtatcgttgattcttcgccgtccgtccggacgtgaggcgtatccgggtgatatcttctacctgcactcacgtctgttggaacgtgcggcaaagatcatcaaggaagaagaagtggcacgcgaaatgaacgaccttccggagagcctgaaaggtatcgtgaaaggtggtggttcactcacggctctgcctatcattgagacgcaggcaggagacgtttcggcatatatcccgacgaacgtgatttctattaccgacggacagatattcctcgaaacggacttgtttaatcaaggtgtccgtccggctatcaatgtcggtatttctgtatcccgtgtaggtggtaacgctcagattaaggcgatgaagaaagtggccggaaccttgaagatggaccaggcacagtatcgtgaactggaagccttctccaagtttagcagtgatatggaccccattacggcgatgactatcgacaagggacgtaagaatgcacaattgctgattcagcctcagtatagtccgatgccggtagaacaacagattgctattctgtattgcggcacgcacggtctgctccacgatgttcccttggaaaacgtacaggattttgaacgcagcttcatcgaatctctacaactcaatcatcaggaagatgtgctggacgttctgagaaccggtgtgatagacgataacgtgaccaaggctatcgaagagactgccgctatggttgccaaacaatatttataaaatgaagacgctgtgtcaaaagtcaatagtaactgaactgggactgacttttgacacacactcattcttaattcttaatttaaatagttatggcttcactgaaagaagtaaaaaccagaataaattcggtaaagagtacccgaaaaatcacttcagcaatgaagatggtggcttctgccaagttacacaaggcacaaggagccattgaaaatatgctgccttatgaaaggaagcttaacaagattctgaccaacttcctgagtgccgaccttcctgttgaatctccttacatcaaggcgagggaagtgaagcgtgtggcaatcgttgccttttcttcgaatacgtcgctctgtggtgcttttaatgcaaatgtgattaagatgctgctgcaaacagtcggtgagtttcgtacactgggacaggataatatcctgatattcccggtagggaagaaggtggatgaagcagtgaaacgcctgggattcgaaccgcaggagacttcaccgacgctttccgacaaaccatcgtatcaggaggcttccgaactggcacatcgcctgatggaaatgtacgtatccggagaaatagaccgggtagaactgatctatcatcattttaaatcaatgggcgtgcagattctgcttcgcgaaacttatctgcctattgacctgacacgggtcgtggatgaggaagagaagcaaaaggaagaagaagtacaaggaggtgaaatagcgaatgattacattatcgaaccttctgcagaggaactgatcgccaatctgatcccaacggtattgagccagaagctttttacggctgccgtggattcgaacgcttcggaacatgcggcacgcacattggcgatgcaggtggctacggacaatgcgaacgaattgatccaagatttgacgaagcaatataataagagtcgccagcaggctattaccaacgaattattggatatcgtgggtggttctatgcagtaaataaagattgcacgataacactattttgtgaatcggtattccgtttttaagctttgtccggctggtaattaaataatctatatatttgaaaattatttgagaggtgagattgttttgatgggaacaaaacaagccttgataactaacaaaacaaatatatagattatgacacaaaagcgattattcggcatttctggtgctattgctacggcagcattgattggtgggctgttggctggatgtatggaaaaagatctgtacgatcctaattatggaaaagaacctcttccggaccctagcgagtatttcggatttgaaacacgtggcgacgtgaaactctcagtaaactatgatgtccccggacttgtggctctacttgaagtgtatgatgaagacccgatggaagtagtggacaatgttccggtaaagaaagaaggggttgaagctttattcaaaatttttacggatggaaatggaaaatatgaagggaaaatgaatattccgacttctgtagagactgtttacttgtatacatcaagttggggagtgccccgatgcgtaaaactagatatcaaagatgggatggctagttttgatatgagtaaaaaggattcttctactgccaatactaaagcggtaacgcgttcttatgacttttcgaaaggtagcgtgccgtatcttatcaattccggtgctaatttgtattcattgtgtaagtggggagaaggaggaaatctcacctatatttataatagtcaaacaggaaagccagaccctattaataatggatatgtaacacctcaaaaacaagtgggtaatgaattgattggaaatcttgtagaacgtttaaactcttttttcaagccatccggaggttctgttgacaacgcttatttgtataagggatctgaaatcactaatattaatgtaacacaagagggaactacgttagatttggtctttcttgacagggacgcttcatttaataattcatttggatattattattataaaacaagtgatggagttagtaactctaatatgaggaagtatatcgtatttccaaatgttgctttttccgtatataatggggctttatctattttgaagtgtggagataaagtacgtctgctcttttggggtgaggatggtaaaccaagtgagaaatttccgaaaggatatacagtaggatggtttatatatgcagatgggtatcatcaaaatgagaatgaaattgacattacaaagccattaataacttctaatgggtattctaatggtggtttcgtatctgtaaaagatgaaaagagtggaaaaaccattattggtgtggaagatggagcaaacagaagtttttgtgatctactattttatgtagatgcttctccggaaagttctattgataatccgaacagacccaatatcccgagtgatgataaaccaatagaaaagccggatgcacaggagaacttaaaggggactttagcctttgaagatatttggcctgacgggggagattatgacatgaacgacgtgatcgtagaatataatcgtgccatatatttcaacacagaaaacatgataaataagattgtggatacatttacgcccacacacgacggagcgatgtatgataatgcatttgcttatcagatagatggaggacagtttggtaaagtgacttcagataaggatataaaagtggagagcgaaacgtcttctattattgtattcccaagtgtaaaacaagctgttaaggggaaagtgggtacgtgtacgataaccagaacctttgaaaaggccacttttaataaggagaatctgaagatatataatccgtacattatagtaaaatatgcggcagggcaacagaaccggacggaagtacatctgcctaaatattcaccgacatcttatgctgacaaatcgctgataggttctagtaaggatgtctattacattgatcgtgacggagcttatccgtttgccatcgatattccgatgttgaatttcattccggtgacggagacgcataacattgatacggaatatccttatttcaagaattgggctgattcttggggatcaaaatctacagattggtacaagagatatcagtcttccaagaattaagaaacaaaaacaatttcgatatataactgtgacacgactttgtgttctgatttgatccggtcccggtgtacttcaagcgagaagaaaccgggaccttttttgactcattttcttacgttcaatttcggtggttggaatctattcagtacctttaccgaaaattagaggaaacatggaaaataatcctgaactacaactagcttggcagttcattgaaaatacaggcacgcatctgtttcttaccggaaaagccggaaccggaaaaactacatttctaaaacgattgagagaacatacccccaagcgcatggtcgtattggctccaacaggaatcgcagctatcaacgccggaggggtgacgattcattctttctttcagttgtcttttgctccgtttgtgccggaaacgactttcaattctgccaagatgcactaccgtttcagcaaagagaaacggaatattatccgcagcatggatctgcttgttatcgacgaaatcagtatggtacgtgcagatttgctggacgctgtggacgcggctttacgtcgttatcgtgaccgtgaaaaacctttcggaggtgtgcagttgctgatgatcggcgacttgcaacagttggctcctgtggtaaaagacaatgaatgggagctactgaagaatcattacgagactccatatttttttgccagccgtgcactgaaggaaacggtgtatatgaccattgaactaaagaaagtctaccgtcagagtgatactttctttctttctcttctgaacaagatacgcgaaaataaagcagatgatgaagtgttgaacgaattgaatcgtcgttatcagcccggttttcgtccacggaaagaagaagggtatatccgactgacaacgcataactatcaggcccagcaggtgaacgaccgtgaactggcatcactgtccggacgggcttatagttttcgggcggagatagagggaaattttcctgagtactcgtaccctgcggatgaagtgcttacagtcaaagaaggagcacagatcatgttccttaagaatgacgtttcatcagaaaaacgttactataacggcatgataggcgaagtgatgagtgttgacgaaaaaggaatgtccgtacgtggaaaagacagtagtgatgtctttcagttgttgcccgaagaatgggggaattataagtatgtgctgaacgaagaaacgaaggagatcacggaagaaatagaaggtgtgttccggcaatatcccatccgcctggcgtgggctatcacgattcataagagtcagggtctgacgtttgagcgggcgattatcgatgctcgtaactcttttgctcatgggcagacgtatgtagcattgagccgttgcaagactctggaaggaatggtgttggagactcctttgcgtagggaggcgataatcagcgatagcattgtagataatttcacaagagatgtggaacagaataaaccggggagcaagcagttgaacgacatgcaaaaggcttatttctatgatctgttgaatgatttatttaatttctattcgcttgagcaggcttataagcggttgctccggatgatggatgaagagctttataaactttatccgaagttgcttgccgagtataaagaactggctccgcatctcaaagagaaggtggtggaagtttccaatcgctttcgtaatcaatatacgcgtctgattaacgagaatgaaaattatgccggaaatgaggagctacagcaaaggattcattctggtgctgcttatttctgtgaagcattgcttcctgtccgggcgctgtttgacaagaccagtatgcctcttgataataaagagttgcggaaacaactgaatgaacgtttgcaggcattggacgatgctttatggattaaagagtctttgctggatgcgatgcggacggagaaatttacggtaacggattatctgaaacggaaggcgaaagtgatgttgagtctcgaaggggaaactgcttcttccggttcttccaccaaggctccgaaggagaaaaaagaacggaaagaacgcactcgcagcaattcaggaaaggtgaaagtagaagttccgacggatattctgcatccggagctttatcgtgctctgtcggaatggagaacggcaaagacgcgcgaagtgaatatgccggcttatgtgatcatgcagcaaaaggcattgatgggtattgtgaatctgttgccggatacaccagtagctttggaagcgataccttatttcggtgcgaaaggagtggagaagtacggacttgaaattttgggcattgtgcgcaaatatatgaaggagaacaaactggaacgaccggagatctttacttctgtttcgggcggagaggatgtacgtgaacaaaagctggacgcgcagcatcatgaggataagaagaagcagaaagagaagaagaaagattcaaagctggtgagttatgaaatgttttgccaggggatgacgatagaagagatagccaaagctcgtgatttggtgacgggaacgattgctactcatctggaacattatctccgtgaagataaaataaagttggaacaggtagtgacagcggacaagataaagaaggtccggacttatctggagacccatgaatttatgggagtagtagctattaaagctgcattgggagatgatgtttcttacgctgatattcgttttgtgttggcgacggtggggcgctaggttataagttacagaagaaagaaacgaatacaggcacgctgatatcgatcagaataccatgcaaaatagcgataggaatcatttcttttcccgaatatctgctgatggaaggtaataatacatccattgagttgactcctgccgccgaaatgggagcaagttttccgaaatacttcttgataagcggtgtacctagaagtgccatcatttcgcggaagatattagtcagcagggcaatggtacccagctctgtagccaactgtattccgatggtcggttccttgaactgagtgatcaggatggaagatagcgaataataggcgaatccgcttcctactgccatacagtcgaatacactccattgacttagcaaaatgcttgccaaggcagaaaacaacaaagtgccggtaatggtacccaacggaatcagcagcattttcgggtgcaaatgtgagatgatcgctttcaggtttttattggaaccgatactgatttctacttgcagcatcaacgcataaagtatatacatggaaacagtatgtgtgtcgaactggaatttattaaaaactcccatgatacagcctacacagaaaaatacgataacgatgagacttcctttcattatttacctcctttcttgaaaaatagttgtaacacaagccgggcagccaacaagctccctaatacgccggatacggcaagaatgatcgcctgccatccaaacttaccgagattattcacaatcaggctattggagccaatggatactccaagaataaagagcaacaggaatattgtaagagaaattgtcttttctgtcttttgtaagatactccagttacgtaatccgtatccgataccgattcccaaaaacatggtagatataatagagaacatattgtaatatattttagttggttaggttaaacaaattataaatagcatggataatccccaaaaagatatacatcttattgacaatcaggtaaaaatactgtctgttgagtaacgaaataagtcaacaggcagttggggataagaatgggtaaggggaatttagatgaatccgctgaaccaatgtacatgcacgcaacatgacgtgcagaaattgggaatttccgcatgaaatataagggcgttatgtaattgtaatgtttgattcatcttttggttctttaattcgggtgcaaagataagaacttattgcatattttcaaaataaatatgcaataattgaaatcggtaaggttgttgaaacaaggaatggaatgttgtaaaaagttagtaatgtagaccttaacctttatataatatgtgcttatattattattttatatggttatgacagttcgatgcttgagccaaattgttatgttgtatagggcacatactttcatttgggcaaacaatctgattaataggatatgtcggttaatgtttccactccatgagaatatctttcagctttcgtggctggtaaccaagtatagtccgggcttttgctatgctcatcccactgaaacggggacggggagtagcttcttgcatttcttctgttgtggcagggtgaacgagcgaacggtccagcttcatgtagtctgctacctgaaaagcaatttctgcaatggtcaggcattcgtcgccacagatatgaaaaattccgtttgcggcattttctaccaagtgttgcactccggctgatacgtcacctacataggtgggcgtgcgccattgatctgatacgacacggatttcttgtcctgcattcaaacgattcatcaccagttgcacgatgtttccatgttgtcccggcaatgcttttccgtagacaatctctacgcgggcaatagcatagttactacagatttcagccactttctcttctcctttccatttggtgaaaccgtaatagttgacgggagcagggagagtttcttctgtataaagctgtccggacttctcgtctatctttccgtcaaagacaaagtctgtagataaatgaatgaaccggcttttgtaactttcgcaaagatgtgccaattgttctactgccgtaacatttgttagccaggcttcttcgtgatgcgtttcgcaataatcggggacggataaggcggaactgttgatgaccacatcgggttgtacctctttgaaaagttgctttacagctgcttcatcccgtatatctgtggtggtgaaatgatagttgcctccattcttcggaaggatatccggatgcagggaacatcctgttaccttatattgtaccttgctcgacaggtcattcagtatttggcgtccggtgaatccattggcaccgataatcattatattcttcatgggctgttttatagtcgtttgtttcagtcatatgagttttttcagtcacatgagtgagtttcggttcagaaatatggcttttctatatttattttcacaaaagtagaaaataattttagttacgcaaatagatttcgtagttccctttttattttgctcttttgcgaatttaagcatatcattatcaggtccgatgcgcatgccggatggattggatgaagcaccgggagcttacaaagatattgcgcgggtaatcgctaatgagcgggatttagtgaagcctttggtggaattggcgcctatggcggtgatcaaaggataaaattagctgacgagatgaggtatggacataaaaaaaggagcaacgccttgctccaacctttgttaaccttaaatctaatactatgaaaaacacattgcaaagatacggacttctgcgaactttgcaaattatccaagaaaaatagtatgttttataacattgattaagaatttgaattctcgattctatttttattaagagattttctgatcttatctcttgttcctagtgagtagctgcataccatgctgtttcttctttttttgaggccagcgagtgcgtacttggatcggagattgtaataccggagaaggtattgattttcacttctcctctgctcatcgaatagaaatattctgtatttcttttgaatggcaccgtacgattgagctgttcgttgaatcgtgccactagagtttcatcagggcataattttgaaacatagtcaccatagtcaaagaagataaccggataatatccgtccagtctctgtaaagaactggttagtgaaggatcaaaagtatatcgatgattaatttctttcataatagttgccaggttatcaagttctgagcaatcagtgacagcgattgttccgcagggtgtgctataagtggaataaaaagagtaaaaaccgtcacagataccggcataatctactttcccaattagatactgacctatctcggcgtatggcataccatacgccatcacttcacttgtagatcctatcagataatcagtcacatctttgagagcgtaggctacttcaatgcttgacatatagcagtcgtcaaagagtatatattccattttaagtccggcattggatattcctttggcaagtgtggttatatcagtctgatattgggcatttaatcctccgaagtagcgtgtcattggtacattttcgtattcccagtgcattttggtacgaagaccgctacgtgatttagaatttgatacgggtatccatcccatgccatgacagccgataaccatcgaatagcgtttggtgggagagtaacgttgcacatcatttaggatggatgtgataccttctgctgtggtatatgcaggatctgtatagttctttagagttttatgcacactcttgccattctcataagcgagttcaaaaagagtggctttcgttgctgtggtacacatgaaaatgattatccgttcatccttcaagatattcttttcaactacactttcaaggtcgctgatgttctgatagaaattggatgtgagattatcagaccaggggagatacatgaataccgtttgttctgtaggtaccggaactggctcttccttttcgcacgaagtcatgccaaaagaaaggaatagtacgatgataactgatttaatcaaatggtgatatttccgctctgtcttcattgttttgtcaggattaaagttacttcttgatatataacgtaaaaagagcactttttgatttatatattcagaatataatctgaatgtatccttttcaagtgttactgcaaatctactgaaaaataatgtaattctactatatacgaaagtccaatagctcacgtatggacataaaaaaaggagcaacgccttgctccaacctttgttaaccttaaatctaatactatgaaaaacacattgcaaagatacggatttctgtgaactttgcaaattatccaagaaaaatagtatgttttataacattgattaagaatttgaattcttaattctatttttattaagagaaaagtcagttaggcatcttgaaatcattcggcaaacaaccggtgatcttcttaaacaggcggctgaaatattgcggattccggaaaccgagttcctgcgctatctggctgagtgttttatctgtatttatcaaccactctttagctatctcgaaacgcttgaactgaagatattctttgtacgatttccccgtttcatattccagcaaatcattgaaatatgcgggagaaagacgaagtactctgacgcactcctcaatagtgggaagatcggaggactgactttgtatagtattgaaatgatcatccaaaagacggtcaaaccgttcgataatctttttgttagcctcattgcgtgtgatgaactggcgttcgtagaagcgttcgcaataatcaagcagtagttcgatgtatttggaaatgatcttctgactatagcagtcgatacagcgttgcaattcttcatttattttatccagaagttctagtatgacctgcttttcacgtaatgaaacatgcagtgcttcttcgggacgataagagaagaaagtatagtcacgaatgttcgctccaagcacagtgccgcagatcaagtcgggatgaaacgccagtatccatcctttggaaggacatgtgttgtcactatccttcatactgattgactcgccgggagtcagacagagaagtgtcccgtccgagaagtcgtagtactgatgtccgtatctgtaggcttcacatttgcattcgctcaacagaatcgtgtaaaatccgaatttgaaatccgtatgggaggataaatcggcttttgaaaggtcgatgacactgaccagagggtgcagcgtcttactccccatgcagcaattacattgatgcacacttcctatcttaagtactttatctcccatgacgtaactaatatcctgattaatggagctgttttagttctgttgcttatattcgtttggcgtatatccgacattcttcttgaacaaccggctgaaatgctgcggatactggaaccccagttcatacgcaatctggctgacggtctggctaccttctaatatccgttccttggcaagttctatgatccggtgctggatatattcctgcgctgtttttcctgtttctttcttgattaggtctccgaagtaattggaagaaaggcagactttgtccgcaaagtattttacagaaggaagtccttcggtaagtgcagtctgattctgaaaatactcgtccaataactgttcgaatttcacgatgatatctttattcgcctgattacgggtgatgaattgccgttcgtagaagcgcatgcaatagtcgagcaatagttctatattgcggacaatgagctgtttgctgtgtttgtcgatggcatgttccagttcgatttgtattttgtggatacagtcggtcacgatttccctttcctgttcggagagatgcagtgcttcatttacttcgtaagagaagaaactatagtgtttgatgttctgccctaaagaagttccccggattaaatcgggatgaaataaaaggccgatagattttgtacgaattggtgtctgcttgcggttatctatcccgataacctgtcccggagccatgcagacaacggttccttcctgatagtcataatacttccgtccatatctgagatcgccacattttgcgtctttcagaaacagagagtagaatccgatattcatacgatagtagtctaccgtctttgtcgctttcgaaaagtcgatcacgtttaccagtgggtgcaaggtctctagtccgaacagttggtcatactggtcaatgctttcaatttttgttatttcttccatacggcttacagttttgatctgtcacaaagataaagcttttaaatgtatctttctcattccggatttgcaaaacagtaatttgggtataagattcagtaatttgtatacaatgccggcgggcagtaggatgcaaactcacttttttcagctaaatatcagcgtgtcggaaacaaaaaaacgggataatcacgggatgtgaatagtagaattaatatatttgttcctgcgaatttaaaaagacttgttttatgaaagcattattcattggaggaaccggtacgatcagtaccgatgtagtagaattggctcaacagagagggtgggagataacactgctcaaccggggctcaaaaaaactgccggaaggtgtgggcagtatcattgccgacattcacgatgaggaagctgtggcgaaagctattgcagatgaaagttatgatgtcgtagctcagttcatcgcttacacggcagaagatgtagaacgtgatatccgtctgttccgtaataagacgaaacaatatatttttatcagcagtgcatccgcctaccaaaaaccgttgactgattaccgtatcacggaaagtacccctttagtgaatccttactggcaatattcacggcataagattgccgccgaagaagtgttgatgacagcataccgtaccaccggttttccgattacgattgtccgtcccagccatacgtataatggaacgaaacctcctgtaagcctgcatggaaataaggggaactggcagatacttaaacgtatccttgatgggaaaccggttattatccccggtgacggaagttccttgtggacactgacacattccaaagattttgccaaaggatatgtaggactgatggcgaaccctcatgccatcgggaatgccttccatatcaccacagatgagagtatgacttggaatcagatttatcaaaccattgccgatgcgctggggaaacctctgaacgcactccatgtggcttccgattttcttgcgagacatggcgggaactatgactttcggggcgaactgttgggggacaaagccgcaacggtagtctttgataattcgaaaataaaacgccttgtgccggactttatctgtacaacttcgatggcggacggtttaaagcagtcagtacaatacatgcttttgcaccccgaaacacagactcctgatccggagttcgattcatggtgcgaccgtgtagccgacgcgatggctgcggcagacagagcttttgaagcagaataaacgttagttgagtaaataactcatcttgttattgatgattgaaatatcctattagcatattctgattagctattagctaatcggattatgctaatagctaatcagaatatgctaatagccgaaacaagtcgatcataatgagtagcgtagttaataaagaccgttccgtctctgctgaacctcgatccggataccgaaattaccattggaggacttcagttcgaatgctccccggaaattattcttctcccaaggcatggcactacggttgggcactttccatccgtctttgtcatagtctccgtatgtattgattttccatccgtttttcagtttgaaggtgcccatctgcatgaactgcggtgaagacgacaatccccagccatacccatatccgaaaccggagaaaggggaagaaaatgcgtcggtgaatccttgtgtatagctggcgtctgtattcagacggaatatctgattatagtctttactcacatccggtacatcgagactgaatttcggaagtttgggaggggtcacattcattaatcccatatcgagcaggaagccaccgaattcctttatattgctcgacggagcacgacgaatactatcggaaggaacttccgactgtgcggatgcaaaaccgaccgataatatcagcgaaagaaatagaatcagttttctcatcttcgtaaaggttgattgatgacaaagatagagatttttagtctgactgcctgcttccgttatgttttcttagagaaaaatcctttaaaaaggagtgtgccgctgtctcgtcgggatggtgtcactatcccgctgagatagtgtaagtatcctgtggggatagtgacactataccagtaggatagtgacactattttagagcttagtttgcaatgagtttatagccgattccccgcacattgacgatacgtatttgctcatcctgtgacaacttatgccgcagtttcgtgatgaacacatgcagactccgggaattgaagaaactgtcatctccccaaagttccagcagaacgtcctgcgtattgaccacctgattccggttctcacaaagccgtttcagtatttccgactcgcggtgggagagttcctgtctcactccggcatgcagcaatgtctgcgcgaccggatcgaacagataacttcctatctcaaaacggctggatacttttgtctccgtgaagctgaacgcttttcccatcagcgccttgatacgtatgatcagttcctgcatgccgaaaggctttttcagataatcgtttgctccgagttcgaatccttctactacatcgttgatggccgaacgggcagtcagaaacagtacaggtgtctgcttgtccgtctgccggatgcggcgtaccatttcgaagccgtccattttgggcatcatcacatcggccaccagcacgtccggccgaagttcaaagaaaagatgcaatccttcttcgccgtcggaggcggtatggatggtaaaaccgttttcctcgagcgtatctttgataatcatggcgagtgtcagttcgtcttccaccaacaatactgtaatgtcgtttttgctcatgtttttgatgttttagatagtaatggtaaatgtacttcctttgccggattcacttttgacggtgatggtgcctccatgtttttcgaccatgcttttgacatagaaaagtcctaagccgtatcctttcacgttatgaagatttccggtcggaacgcgatagaatttgtcgaatatatgtttctgcttgtcaagcggaatacctattccatgatcggagacggtgatagtcactgtttcccccgtttggcggcactgaatcataatctctgcttcttgtttcgaatatttcacggcattgtctatcaggttactgatgatattgctgaaatgagtgcggtcggctactatcgtcagtgcttccggttctgtttccagtgttatgtgtacggggatatccgcttttagctggtgctgctctattaaagaagtaatcagttctttcagacaaatctcttcggggtgcagtctgaacgtcttgcggctttccatgctcatggaaagaatctgttcgacgagtccgctcaagcgctgtagctgttcttggctgatgcgcagatattggtcacgtttgctcttctcttccgcctggttgaaattcagcagcgcatcgttggcggcatacgccacggcaatcggggtttttaactcatgcgtgatgttgttcgtaaagttgctcttcatttcttccagcgtcttttgtttcagcagtgtgcggatgaggaaccagaaggaaaatccgaggatgaggaagatgacaaatgaagtgactaggatgccggtcatttgtttccataccagtgaggtgatgggttctattatcagttggtagcgttgactgtgatgcctgttgaattcgtaatcgtagcggatggctttcgggctggggatataggtgctgtctcctgcgatgcccagtgtatctatgaatgtctgggatgaatcctgagtggctccgctgtatatatataaggtacggtgaggcacatctatgttgtgtgctttcagtacatcggtcagtagactgtcatatttttgcaggttgatgtcgatgtaggtgtccacgccggagtgcataccctgctggacgctgagtatgagttctttcatcgagtcctgtttctttaataatacatcaagtccgctttcgctggaggcaacggcgctggcatccggatcgttggcattgacggccagggtatctactgctgtttccgtgcgtgtatgcagggtgtctttgtaggtactgtccgtataagagacggtctggcttgtcaccagcgacttgccgtccgcaccatatccggcggaaacggtgaccgaaccatgttccacattatccttttgcagctcgttgacgcgaagcacgatttcattaaagtcgctcgtacgcatggcgtctttgatattattgttcatttcctgcttcatcgtgcggtaaagccctgtcagccaatatgtctggtaaacaaagatgcctgtcagcgagcagatgacaaggataatgatatgtttcaacggtagtttcatacggacaaagatagtatgaaactgttatttttcttctctttgataagactaaataacactagataagccagcgataacgtaaagtttcgttttttctcccgtattttgcagcatactcaaaaataaatgcgatatgaaacgaacttatttactgcttttgttacttttcatgtattggatgtacgcttctgcacagcaggtacagacagcgcaggaacctgccgacagtgtaataaacgtagcctatatagacagtctgtatcgggaacttcccgaagtcatgatcaccggcgaacgtccggtagtaaaagccgaacaggggaaactggtatacgacgttccgagactggtcggcagcctgccggtagacaatgcctatgatgcagtaaagaacctgccgggagttgtctccatgaatgatgccctgatgttgggagggcagccggtcactgtggttatcaacggaaaagtgaccaccctctctgtagagcaattaagcaacctgctgaaatcaatgcccgtcagtcggattgaaaaggcggaagtgatgtattccgctccggcacgttatcaggtgcgtggaccgatgatcaatctgatactgacttcgggcatgggaaaagaaccttctcttcagggagaactatataccgcttacagccaattacactacgaatctctgacagagcgtgcgagccttctatactccggacgcaaattttctgctgatcttctctactcttactcttacagccgcgaacggagggagacagacaaggaagcgcttcacacgctcgccgacggttcggtgcatccgatgaatatgtatgatatcactacttcccgccacaataatcaccagatacgccttgggatggactatgcctttaccgacaagcatttgctgagcttggtttataccactgctttcaccgatgtcaaaccttacgccacagtcacgggtgcgcagaactcggtcaccgattcgcactcggaaggacagctccataatgccaaactcgactatcagactcctttcggactgaaagccggagcggaatttacctattatcatgctcccggcagtcagctgctttacagcacactgggagaagaaacactgaacttcctgagcaaagataaccaacggatcaaccaatggcgtttctatgccggacaagaacatactttgggcgcagactggggattgaattatggtgttgcttatacgaccgcattggacaatagttatcaaatgtatttcgatcccgaaacggaaactttactgccggacaacaacatgcaatcccgtcgtcgcgagcagacgctgaacttttatgccggactcagcaagagtttcggtgagaaactttcggcggatgtctctctggctgccgagcaatatcatacggatatgtggaacgaatggagcctgtatccggttgccaacctgacttatttgcctgccccgggacatatcctgcaattttcattgagcagcgacaaggaatatccggaatactggagtatgcagaactccacttcctacatgggcgcttattccgaaatccagggaaatcccttccttaaaccggcaaccaactacgaagctaacattagctatatattaaaaggtaaatatgtgctgaccgcctattacagccgcacgaaaaacaaggaaatgcagacgctttaccagtctccggaacgtctggtcgagatctataaatgctttaacttcgacttctcggaacaggcgggcttggtaatggtagttccctttaaagtgaagaaatggctggactcccgcatcacggcaatcggctttcgttaccgtcagaaagacagtgatttctgggatatcccgttcgaccgcaaactatatacgtttgtattgacaatgaacaataccttcactctttccaccaaacccgatttgaagtttactctaagcggattttatcagaacaaggcgatacaaggcattttcgaccttccccgttcgggaaatctggatgcggccctgcgctatactttcgcaaagggaaaagcacaactgaccttgaaatgcgacgacatatttaatacttccaccatttcgactaatgtccgtttcggacaacagaatgtgaagaatcactatatgaagactacccgtgccttcggtatttccttcaactacaaattcggaggatacaaggagaaaaagcgggaagaggtggatacttcccgctttaaataataagtattacctattttctgcatactcatccagtacgcgcttgatactttgtcctatttttacgtaatcggcttcgttcagattggcgagcgaaacacggacactccatttcggtccggcaaatccgccgccgttcagcaggacgagcgaagtctcgttggcaaggcggaaaacaacgtccagcggattgtaggtcttttgcagatagtctacaaattcgtcaccgtagaatttcttcgcccataccagcatatcgatttccgaataatatccggcacgcagcgggtcttctatcaacgtgaagccggtgctgtcccagagtgcatgcagtcgacggtggatgatttcctgcatctttgccttgtaccggtcttccttgtcgagaagagagaaagcggcgaacaggctcatctgcatttgctggggcagcgagagtcctgcggtatggttcagcgcaatctgccggctgtcggctaccatgcggtcaataaacttcatcttctcggggtgtaaactgaggcttgcataacgcttgtttaagattgctgtttgctcctccgacaggcgggcaatcattttgtcgtagatgttgtcttcgtgtagggctatcactgcatttctccatcctgtggctccgaaatacttggagaaggaatagacgcagagtgtattatgcggcaactccgccatcaacgaacggaagtgaggtatgaatgttccgtacacatcgtccgtaatgatcatcagattcggattgtcattctttacgatgttgacaatacgtgcggcagtctccggactcagcgcataactgggcggattgctcggattggtgatgaacaacgcttttatctgcggattcttcagcttatcgatatcttcatctttatattgccaggtgtgcagcccgtccggtgtcatctgatcggcagatatttcggtaacatcgaactgatagcggcgtaattccggaatctcgatgtagggcgtgaagacaggaatcatcaaggcgatggaatccccttgatttaacagaaagttttcctgcaatgaatcgaatacatagcacatggcagccgttccgccttcggtagcgaaaaggtcgaatgtgcctttagggggacggcggtcgcacatttcctgtgccagataatcctgtacgatcagttcggtgaagtgcaggatacggtcggggacaggatactggtcgccgatgaccgattccgcccattcatgaaccagtctgtccggatcggctgcgtgctccatcagcatataattataggtttctttcagtaacctgactccggcttctttctcgttctctttgaggaaagcctcgaagcgggcggctattccttcctgttgtgggatgcctgcaattccttcttccagggattggacacggcgacattcgcaaagtccgaattttcctaacaggaagaatgcttcacgcggttcggtcgcaatccagttcgggttgcctcgtcctgcgttcagcatggtatgggccattttcttgatactctcgtcagccatttcgatgagcttgtttttaagttcgaaagggctgatcgtttccatctttttggcaaagttcttggtgatagctgtgccagttgttttcttttccataatggttcttattgttttgatacttaattttgatttcctatacattcattatactgacatttacatgagcaatacgatggctactccccagataatcagtagtgtattaccgactgcatacgtcacggtgtatcctaacgcgggagtgtcgcttcccaatgcatcctgaatagctcccagtgcggcggttgtggtacgtgctccggctgtacatcccagtgtgagggcagggtggaacttgaacagatatcttcccatcagcagtccgctgagaagagggatggcggttgccagtgcaccgacgataaacaggctgaatcctacttccttgaaaccggtcacgaaactaggtccggcagcgatgccgacaacagcgataaacatattcaatcccacattattcaatacccacaacgaaggttcggggataccgccaaaggtcggatgtttgctgcgcagccagccgaatacgagtcctgcgatcaaggcacctccactggtggacaggctgatcgggatacctcccaggtgaatggcaagtgcgccgaccagaccaccgagcaggatacccagtcccacgaagatcatatctgtctggttggtggggcgatcgatatagcccatctgtttggcggcagtttctacttcgagttttgttccggtcagttcgagaatatcgccggagtcgatcactgtctgagcgagtaccggaacattgatgcctgctcgcttgatactgcggatactgactccgtgcatgaatttcagcgcacggatcgtggagaccttttcgcctgcgaatgtgcggtgggtgaccattaccggaagcgtctctgccggaaagtcgagcagttgggcgtcgatcacttccggaccgatccagtcttcttcgccaattgcatattcacggcggccgcttaatacgacttcatcgcccggttgtagaagcatatccggggtgacttcttctatgacgcccttttgccgtacgcgttctacaaacagccgtttatcgttttccaccagatagttctccagttcgctgactgtttttcctttgccgaaccattcgttgtctattttataagcacggaatacgacggggcggagggcggtgtaaaatccgggttcatctgcttcggaagttcccattttggcttccagctctttgcagtccgctttcaccttctccagtccgcccagcattttgggaccgagtgaagccagaatccatgcggaacctgccgtaccgaaaatataagtcacagcgtatgctacggggatggcattgataaatgtcgctttctgcgcatcgctgatgcttaattgattgatcgtgtcgcttgccacaccgattactgcggaaatggtctgtgagcctgccagcaatccggcagcctcgcctacatggtagcccatgattttggcaagtatccatggggcgatgaggctgacaatgcacatcaggacggcaaatcctacttgcggcaatccgtctttcttcaatccgcgaaagaattgcggacctaccttatagcccacagcgaataaaaacaggaggaaaaagacagctttcatcgggccgtctacactaatgtttaattgtcccaccagtactccgaccagtagcacgctggttactgttcccaacgaaaattttcctattttgaatctgcccagccagaagccggcgaataaagtgaggaaaatggcaagttcgggatgatccctgagttgattaataatccattccatatatgttgttcttgtttaggttatgttcataacaacagttcttgtgcaaaaagagtttagtgggttaagtacgttatcgtcatagtttctaaaaatataaattaattgtgcggaagtcccgggcaaacgagagagcgtcttaaatttctcagtttcgcttttttgttatacttttgtcacttcaaataaaactaatcatattctgtatgaaatcagacatagaaatagctcgcagtgtcgagttgaaaaagatcaagcaagttgccgaaagcatcggaatccctcgtgaagaagtcgaaaattatggtcgctacatcgcgaagattcccgaacaactgatcgacgaggagaaagtgaagaaaagtaaccttgtcctggtaactgccatcacagcgacaaaggcgggtatcggcaaaactacagtatctatcggtctcgccctgggactgaacaaaatcggaaagaaggcgattgtcgctttgcgcgagccgtctctcggtccttgcttcggtatgaagggaggagcagcgggtgggggatatgcacaggtgcttccgatggagaagatcaaccttcattttacgggagactttcatgcgattacttccgcgcataacatgatttctgctttgctcgataattatctttatcagaatcaggcgaaaggtttcggattgaaagaaattctctggcgtcgggtgctcgacgtgaacgaccgttcgttgcgcagcatcgtagtcggactcggacccaagtcgaacggcatcacgcaggagtcaggcttcgatattactccggcttcggaaattatggccattctctgcctttccaaagatgtggaagacttgcgccgccgcattgaaaatattctgcttggttttacatatgatgaccagccttttacggtgaaagatctcggagtggcgggagctatcacggtattgctgaaagacgccatccatccgaatctggtgcagacgaccgaaggtaccgccgctttcgtacacggcggaccgtttgccaatatcgctcatggctgtaactctattcttgccaccaaactggcaatgtcattcggtgactatgtgatcacggaagccggattcggcgcagacctcggtgctgaaaagttctataacatcaaatgccgcaaaagcggactccagcccaaactgactgtgattgtcgctacggcgcaaggactgaagatgcacggtggtgtcagtctcgaccgcatcaaggaaccgaacatggaaggactgaaagaaggattgcgcaatctggataaacatattcgtaatcttcgctccttcggacagacggtagtggttgctttcaataagtttgccaccgacacggacgaggaaatggaaatgctgcgcgagcactgcgaacagttgggggtaggttacgccatcaataatgcgttcagcgaaggtggtgatggagcggtagatatggcccgcctcgtagtcgatacgatagaaaataatccgtccgaacctttgcgttatacgtataaagaagaagacagcatacagcagaagattgagaaagtggctaccaacctttatggagccagcgtcattacgtacagcagcatcgcccgcaaccgcatcaagctgattgagaaaatgggaatcactcattatccggtttgtattgccaagacacaatactctttttctgccgatccgaagatttatggcgccgtgaataatttcgagttccatatcaaggatatagtgattaataacggtgccgaaatgattgtagcgattgcaggagaaatccttcgtatgccgggattgcccaaagaaccgcaagcgttgcatatcgacattgtagatggtgaaattgaaggactgagctgatttttactatttcatttagtatatttctgtactgtcaatcatccaatataaatccccgtctttccacttctgatagtttgggaagacggggatgattgtatatagagtccagtgtaccggtatgttgaccttgtctgatacactgtacgattgaagtcgctgctttccggaagagtatagtgcgtatttcaatttctctttttgtagtaagaaaacatcttttcgagcagatagtttgtctgattctgttaataaataaaaaagaaaagcctgttttcttcacagaaagcaggcttataaaattcaaaagaaattctttatgaaatgttgaacacaaatgctgctaattcacattaccggcatttggttactcaaagaaagaaatcttaatcagcaaaaagaggatatttcttcattgtctcattgacacgtgcacgtacttgtgcgatcacctcttcattttccacgttagacagaactgtttcgatcatttcggcaatttcgatcatcaggtcttctttcgcaccacgggttgtgatggcaggagtacccagacggataccggaagtttggaaagcagaacggctgtcaaacggaaccatgttcttattcacggtaatgtcagcagaaactaatgctttttctgctaccttacctgtcagatcagggtatttgctacgcaggtcaaccagcatggagtgattgtccgtaccaccggaaacgattgtaaaaccacggtctatcaaggcctgtgccagtatggcagcattcttctgaacctgttttgcatattccttgtattccggttgcaggatttcaccgaaagctacggctttggcagcgattacgtgttccaacggtccgccctgtacacctgggaatacagctgaatccagtaattgagacatcattttgatttcacccttcggagttttctttccccaaggattagggaaatcttttcccatcatgatgaccccaccacgaggtccgcgaagtgttttatgtgtagtcgaagtgacgatgtgtgcatatttaaccgggttctccaacagtccggcagcgatcagacccgcagggtgagccatgtcgatcatcaggatagcgcctactttatctgcgatttcacgcatacgtttgtagtcccattcgcgggaataagcagagccgccgccgataatcattttcggcttttcgcgcaaagcaacttcttccatctggtcgtagtctacacggccggtttcctgattcagattgtattcgcaaggagtgtagataatgccggaagtgtttactaatgaaccgtgagaaaggtgtccgccgtgtgcgaggtttaatcccataaacttgtcgcctggattcaaaacagccagaaatacggctgcattggcttgtgctcctgaatgcggttgtacgtttgcccattcggcaccgaagatttctttcaggcggtcgatagcgatttgttcgctttggtcaactacttcacaacctccgtagtaacgtttgcccggataaccttctgcgtacttgttagtcaggcaagaacccattgcctgcattacctggtcacttacaaagttttcagatgcaatcagctcgatacctttcagctgacgttggtgctctttttcgatgatgtcgaaaattaagtcgtctcttttcattctttttataagtaagattaaatttttaattcgagatacctattttaagcgcacaaagttagtgaaaataaataaagaacgaaggaactataagaaaaatgttagtaaatggaggaaattaatagataatggataatttatcgtacggaatgaataggaggtgtctgtttttgccggttgccgactatcaaaagttcatcagccggctgtcggatgttctttaaagaatgaatccgaacgagaaacttaatgcgctgtcgcggcggcggaaaatgatagggctgactcccgtgctgccgtctgaattgatattgtcataaacgatggatttggagatatttcctatcccctgttcgtagcggaagtcgaaaaagatgcgggagatattgacgccgacaccgatcacgacgctgacattgagcggatacagcttttcatgaatccctttctggtcgaagtttgtgaaagtgatttcgttctgctttccccatagataccggagttttggaccggcaaagatagacattccgtatggtccttttttcactacgttatatccgtagagaatagggaagtcgatactgtgaagtacggactgtaccgaagcataatcgggttcgatggcagggtgttgcgaaccgagtttgtcaaaggtgatctcgcctttgctgacattataggatgcttccggctgaatgaaatgcttctttatattaaagcgcatgaagatcgcgccaaaatagccgatcttataattattttgtacttcgtcgatcgttacgtctttgattttcaattcggataccataaacatggaagaattaaatccggctttgataccaaagttgattttctttgtgttgggacgttccactttatctgcgttacgatcttgggcgaaagctgtgcaagctatcgccatccaaccgaaaagaattatgttgcgcagtatattcatggcagtacttttttctttatttcttcttttctacactccagccgaatttccctattttttctcccaggtcgtaatatcctccgtgcacatataccagcgggttcgcttccgccagttcgaacttgccggtttcgggattcaggttccggtcgtctgcacggacgtttaccacatcggcgataaacatatcatgcgaaccgagcgaaacaatttccttcacgcgacattcgatgcagaggggagactcttcgatcagcggtgcgctgactacggtgcagcgtcccggagtgagtttcatctcttcgaatttacgataattccgtcccgaacgtactccgcaccagtcggtggggaacgccatatctttagttgtcagattgatgacgaactccatatttttcttgatgatgtcgtaggagtgtcgttccggtcgtacggatatatagcacatgggcgggtttgtgcaaatcgtacccgtccatgctactgttataatattatattcactttcatcttttccgcaactcaccaatacggcaggcagcggatagatcatcgttcccggtttccagtcttgtttcaatttaataaaaaattaagaatgaggaatggagaaactagaggatggtgatttcctcgcgtttctgttctttctcgcaataatggcacttcacgatgcaattatccttgtctatcacatgaaataacgtaggcataggttcattgttcgtgatacatttcggattggcgcattttacgatgccgtgcagttcgtccggcattctgacttctttcttttcaacgacttcatagtcgcggataatgttcagttttacgtaaggtgctactaccgatatgcggttgatttcttcgtcgcagaaaaacttgtcggcgattttgataatgccttttttccctagctttttgctgtcgaggttgaagccgatggtgatgttacatttcatttgctccacgcccagtagctgtacgacagtaaagagtttttctgatgggatatggtcaatcactgtcccgtttttcagggcagctacttgcaatgcttgtttattttcgctcataataaaatatcgtttttaacgtcctctaatgtgatacctaatacgtcgcaaaggatggcttcacgggcatacagaccgttttgcgcctgttggaaataatatgctttcgggttgttgtccacgtcgtaagcaatctcgttgacacggggcagcgggtgcaggatgcggaggttcggacgggtgttctccagcatcttgttgcgcaggatatatacatttttcactcgttcgtattccatcaggtcggtgaagcgttcgcgttgcacacgggtcatgtacaggatgtcggcatcagcgataatttcttcggtaaattcggtatgttcaatgtatttgatctgatgctctttgcagtatagcttatattcttccggcattttcagttcatcgggggcgatgaagtggaatgtaggattgaagtgacgcatagccatcagtagtgagtggacggtgcgtccgtatttcaagtctcccaccagaaagatgttcaggttttccagtgttccctgagttttgtagatggagtagaggtcgagcatcgtttgtgacgggtgctggttggctccgtctcctgcattgacgatgggtacgggtgctacttcgctggcatatcgggcagctccttcgagatagtgtcgcatgacgatgatatccgcatagctgctaaccatcatgatcgtgtctttgagtgtttctccttttgaggagctggtcgctttcggatcagtaaatccgatgacgcgtgcgccgaggcgattggctgctgtttcgaaactcaaacgggtacgggtggaaggttcgaagaacagggttgctactaccttaccttgcaataaccggcggttggggttcatttcaaactgcttcgccatttcgagcatgtagaggatcttttctttagaatgttcggcaatggttactaaacttctgttttccattttgttatcttttatgtggatagaacttgttttaccggagtgtaaaggtacgaagaaaatgtaaaatacaaactttttttctctttttattcgtttttcggttggttttaaaatatcaaataaatcaaaaactcgtttgctgtatgctatattttatctacctttgcggcttaattataagcatcttttttaagctagaagaaacatgattcgaaaaataataaacgctctttgggtattgttggcagttgctttaatagctatcgtagttgtttttgtgtctatctctaagggctggataggctatatgcctcctgtggaagaactggaaaatcccaattataaatttgcaactgaggtattctcggaagacgggaaagtactgggtaccttctcaatggaaaaaaacaatcgtgtatacagcagctatgccgatctttctcccaacatcattcatgcgctgattgcgacggaggatgttcgctttgccgaacattccggtattgatgcgaaggcacttttccgtgccatcgtcaagcgtggattattgttgcagaaaagtgcgggtggaggtagtacgatctcacaacagctggcaaaacagttgtttacggaaaaggtggcaagcaatactatgcagcgtctgttgcagaaaccgatcgaatgggtgattgccgtaaaactggaacgttactatacgaaagaagagattctgacaatgtatcttaataagttcgacttcctgaataatgctgtcggtataaagacagccgcgtctacttatttcggctgtgaacccaaagatttgaaaatagagcaggcagcgatgttggtgggaatgtgtcagaatccgtcccgttataatccggtatcccgaaatccgaaaatccgtgagaatgcattgggacgtcgtaacgtcgtactgcgtcagatggaaaaagccggttacatctcggatgcggaatgtgattctttgcaggcacttccgctgaaacttgcatatacccgtgtagaccataaagaaggtctggcaacctatttccgcgaatatcttcgtggtgtgatgactgccaagaaaccggttaagagcgagtaccgcggctggcagatgcagaagtattatgaagattcactttcatgggaaacaaatccgctgtacggctggtgcgccaaaaataaaaagaaagacggctcgagttataatatctacacggatggtctgaagatttataccaccatcaattcgcatatgcagcaatacgctgaggatgctatcaaagaacatttaggcgacttcttgcaacctctgttctttaaagaaaaacaaggaagtaagaacgccccgtatgcaagggcattgccgcaggcgcgggtggaagaattgctgaccagagccatgaaacaaaccgaacgttataatgtaatgaagtcagcgggtgcttctgaacaggagattcgcaaagcattcgatactcctcaggaaatgtctgttttcacctgggcaggtgagaaggatacgattatgactccgatggactctattcgctattacaaacacttcctgcgtacaggattcatgtcgatggacccgatgaccggatatgtgaaggcgtatgttggaggaccgaattatacatatttccaatatgacatggcaatggtgggacgccgtcaggtaggttctactatcaagccgtatctgtatacactggcgatggagaacggattttcaccttgtgatcaggtgcgtcatgtagaacaaacgctgattaccgaaacaggagaggcatggactccccgaaacgccaataataaacgttatggtgaaatggtgactctgaaatggggactggccaattcggataactggatttcggcttacctgatgggtaaactgaatccttataaccttgtaaggctgattcatagttttggtgtacgaaacaaggcgatcgaccctgttgtttcactttgtttgggtccctgcgaaatttctgtcggtgaaatggtaagcgcatatacagcttttgccaataaggggattcgggtagctccgttattcgtcacccgcattgaagatagtgacggcaatgtgctttctacgtttgcaccgcagatggaagaagttatcagtgtttcgagcgcatacaagatgttggtaatgcttcgttccgttatcaatgaaggaacaggcggacgtgttcgccgttacggaattacggccgatatgggcggtaaaacaggtacgaccaatgataactcggatagctggtttatgggctttactccatcattggtgtccggttgctgggtaggaggtgatgaacgtgacatccactttggtacaatgacttatggacaaggggctgccgccgcattgcctatctgggcaacttatatgaagaaagtctacgatgacccgactttgggatacagccagacggaaacgtttaaactgcccgaaggttttgacccttgtgccggttcggaaacaccggacggagaagtcttcgaagaaacgggactggacgatttgtttaattaaacctctcatcgtgcataaatgtatcatttgtatcggaagtaactacaaccggaaagagaatcttcttctggctcgcaggagactggtggatttgtttcctaccatccgctttacgtctgaacaggagacacgccctttgtttttcagaagtccggcattgttctccaatcaggtggcgatgttcttctcggaagcggaggaggaaagagtgcgcaaggagctgaaagctatcgagcagtccgccgggcgtcgtccggaggataagaaggaagaaaaagtcagtctggatattgatttgctctctttcgatgaccgggtgttgaagccggaagacctgaaaagagagtatgttgtgaaaggattagaagaattaaaatacaatcagatatgaaatttctgggaataatacctgcccgctacgcatccacccgtttccctgcgaaaccattggctatgctgggggggaagacggtgatacagcgtgtatacgaacaagtagcgggcatcttggatgatgcttatgtggctaccgatgacgaacgtattgaagctgccgtaaaagcattcggaggaaaagtagtcatgacttccattgatcataaaagtggtaccgaccgctgctatgaggcgtgcacaaagatcgggggcgactttgatgtggtagtcaatatacagggggacgaacctttcatccagccttcccagctgaatgctgtaaaggcttgtttcgaagaccctaccacgcagattgctacgttggtgaagcctttcacagccgatgaaccgtttgccgtactggagaatgtcaactccccgaaagtggtgctcaacaagaattggaacgcactttatttcagccgttccatcataccttttcagcgcaatgccgataaggaagactggctgaagggacatacctattacaaacatatcggtctgtacgcttatcgcacggaagtattgaaggagatcaccgctctaccgcaatcctctctggagttggcagaatcactcgaacagttgcgctggctggagaatggatataaaataaaggtaggcatcagtgacgtggaaacgatcggtatcgacacaccgcaggatctgaaacatgcagaagaatttttgaagaacagaagctgatttatggatcgtacgatacaacctgaaatacaagccctgaaaaatttccatatcctttctcccgtccggactactttgccgaacggtgtcccgttgacggttgtcaatgccggtgaacaggagttggtccgtatggatattctttttgccggagggcgctggcaacagtcgcagaagttgcaggcgctgtttacaaaccggatgctacgcgaaggcacgcagaagtatacggcggcaaccattgcagagaagctggattattatggttcatggctcgaactgtccagttcgtcggagtatgcttatatcactgtctactcgttgaacaagtatctggcaaaaacgctggaagtcgtggaatccatgattaaggaacctgtgttcccggagaaagaactgcataccatcctggatacgaatatccagcaatatctggtcaatacttctaaagtagacttccttgcacaccgtggcctgttacaggcgctttacgggacacagcatccatgcgggcaaattgtagtggaggaggattatcatgccattacaccggaagtactccgtgacttctacggacggcattatcattcgggcaactgttccattttcctgtcgggtaaggtgacggaagatatcatccgccgggtgaccggtgctttcgggactcctttcggacaatatcagctgaaagcatcaaaaccgatattttcattcgttgccgttcccgaaaaacgaatattcatagagcgtgaagacgctttgcaaagtgcggtgaagatgggatgtaccaccattacccgtcagaatcctgactatctgaaattacgcgtactgatgacgctgttcggaggatactttggcagccgtctgatgtctaatatccgtgaagagaaaggatatacttatgggatttctgccggaattatgttctatccggatagcggtttgctgggaatctcgaccgaaacggataatgaatacgtggaaccgctgatacaggaagtatataatgagatagacaaactacaccgggagcctgttcctatggaagaactgacgatggtgcgcaactatatgctgggcgaaatgtgccggagctacgaatcgcctttttcgctggcggatgcgtggatttttattgctacttcggggctggatgaccagtatttctcccgttctttgcaggctgtaaatgaggtgacacctcaggaaatacaggaattggcacagcgctatttgtgcaaagagacattaaaagaggtcattgctggtaaaaagttgtcataatttgctttccggtatggcactttttgggagagaagttgtatctttgtccaaactgtaattttaatgagtaacgagtaaaactaatgaggaaatatctatatactacactttttttgactcttcttgcacagggaggagtgatggcacaagataataataccagcaaaggtgggttcttcggaaagttgaaagacacattctctacagaaataaaaatcggaaattatactttcaaagatggtagcgtctatacaggagagatgaaaggacgcaaaccgaacggaaaagggaaaacggtctttaaaaatggggatgtctacgaaggggaatatatcaaaggaaaacgtgaaggctacggaatctattcttttccggatggagagaagtacgaaggtcagtggttccaggatcagcaacacggaaaaggaatctattattttatgaataataaccgttatgacggtatgtggttccaggattatcagcatggtgcaggaacgatgtattatcataatggcgacttatacgtgggcaactgggcgaacgacaagcgtgagggcgaaggtacttatacgtgggcgaatggtgctaaatacagcggtcactggaagaatgacaagaagaacggcaaaggcaccatgaactgggacgatggctgcaagtacgacggtgactggaaagatgatgtacgtcacggaaaaggcgtattcgaatatactaacggagataagtacgatggtgactgggcagatgacatccagcacggaaaaggtacttattttttccatacgggagatcgctacgaaggttcttatcttttgggagaacgtaccggagaaggcgtttactatcatgccaatggagataaatatgtaggaaatttcaaagacggtatgcaggatggaaaaggtaccttcacgtgggcaaacggtgctgtatatgaaggtgactggaaaaacaataaacgcgaaggcaaaggtatctataaatggagtaacggggatgtttacgaaggagactggaaaaataatcgtcctcacggtcagggctctctgaaaaccgttgccggtatgcaatataaaggtggtttcgtagacggactggaagacggacaaggcgttcagatcgacaaagacggtaaccgcttcgaaggcttcttcaaacaaggaaagaaagatggcccttttgtggaaacagataaagacggaaaggtgatcaaaaaaggaacctataaaatgggaagacttctttaaaagaaagaattatagataaataagaaagccggctaaattcaagtttagccggctttctttagttcgcccagcacgaacatattctaacgggtgtaagtccctaaagcgccctgacaacgggaagtatatagccaacggcaagggtgtccatcgtgaggtggaatctgaaggaagcctgcggcaaatatctggtctgacgtacagaaacttgatattaaggcttaaggatgtggataagtttgctaaacaaaacgaagtcctatagttgtccggaacatccaaagtaaatcaagcagacataagatggaaagaatatgtccataactggggaggtctcacgggcgaggaaaaataaataaatacagtcaagcagtaataacgaaccgtgagaagtcagcagaggtcatagtaaccgacaaggtaaaaaaatcggcagtcggtgaaggactgaacttttaatcaaacaagtaccatttaatactttatgaaagagtcaatgcggaaaatcagtaaaacgaactgcccacaaatggataggacagcatccgacgagtatgtgggagtgcagacttttatggagataaaagatgagcagcttgtggaagtgcaattggaagaaaacaatctgttggaactccttctaagtccatcgaacttgaatgcggcataccgccaagtcgtaaggaatggaggagtgggaggtgtcgataagatggagacgagcgaactgttgccataccttaccctccataaagacgaattgttggaaaagatacgcagggggaagtatcgtccgtcccctgtgcgcaggttagaaattccgaaagacaacggtaaaactcgcccattaggtatcccgacagtggtagaccgctttgttcagcaggcaatcagccaagtgttgataccgctttacgaacctcagttcagtgacaacagcttcggcttccgccctcatcgtagtgctcacgatgcactgcataaggtgcaggaatatgcagaccaaggttatcgctactgtatcggtttggatttggaaaagttctttgaccgtgttaaccacagcaaactgatagaggtcttatcccgaaccgtcaaggacggcagtgtaatatctttgatacacaaataccttaatgcaggagttgtagtatctcacaaatacgcggagactgccgagggcgtcccccaaggtggtccattgagtcctatattgagcaatattcttcttaatgagttggaccaggaattggaacgcagggggcacccgtttgtccgctatgccgatgattgtctgatccttgtccatagtcttcgggcaacggagcgagtccgtgatagtatttccgagtttatagaaaagaagttattcttgaaagtaaacaaagagaagacagaagtcggttccatctgcggcaagaagtatcttggacactccttctactgaagagccgaccgtaaatgtggtcttaatcttcataagaaaagtcaatccaagttcaaacgcaccatcaagcacctgaccagccgtagtagtggtcaaggctacgcttggctgaaactccacctgacgcaatacatccgaggttggctgacatactatcgttatgccgatatgaaagattttataatcaaaacagcgaagtggtacaatcgtcgtcttagaatgtatatatggaagagttggaagcgggtacgtacacgttttgccagcttgcagaagtgtggcatccctcgtcggaaatcttgggaatgggcgaatacccgtaaaggctattggcgcattgcggatagttggatattgcatagagcaatcacaacagataagcttgtaatggcgggttatccgtcaatgataattctttatacccaattgcatcgcagttaagagaaccgccgtatgccgaacggcacgtacggtggtgtgagaggtcggaaaacgaaagtaggaggaaaacttctacttcgttttcctcctactcgattcttatcctttactcatcattcttcatttagatgatatattgtgaactgatggactcgttattcattacccgcttgattgtttctgcaaacatatcagcgatgctcagttgtttcactttcgcgcatttcttagcgtaagggatactgtctgtaaataccatttcagtcaatccggattcctgcacacggaaagaagcagggtcagacattacacagtggctggcaatagcgcgtacggatttggctccggcttccatcatgatattggcagctttggtgatggtgcctgctgtatctacgatgtcatcgatcaatactacgtttttgtctttcacatcaccgatgatttgcatggaagctacttcattggctttttcacgtgacttgttgcagagtaccaaaggtacaccaaggtatttggagaaagtgctggcgcgttttgaaccacctacgtccggtgtagcaatcaccaggtcttccagtttcaatgactggatataggggaggaatacggctgatgcatacaggtgatctacggggatattgaagaatccctgaatctggtctgcatgcaaatccatggtaatcagtcggtcgatacctgctactgaaagcaggtcggctaccaatttagctccgatagatacacgaggtttgtcttttctgtcctgacgtgcccatccgaaataggggataacagctacgacgctctttgcagatgcacgtttggcggcgtcgatcatcaggagaagttccattaagttgtctgagttagggaaagtagactgcacaaggaatacatgtgcgccacgaattgattcttcgtaagaaacggcaaactcaccatctgcaaagtgggtgatgttcatgtttcccagaggacaattgagacttgcgcagattttctctgcaagatatctcgagttagttcccgagaataccataaagggtgctttttcgctcattttgtaatagatgttacctatttgttaatttgcctgcaaaggtaggaatttctcttattatttagaaagacttattgtagaaaaaataattttctctccaacttatcggaaatatttgtagatttgcaagtaagaacgaagaactgagaatgaagaatgaagaattatggacgaaaaacagaaaatgaagagcgaagaatgaaagatagttatcgcctgtctttttattctccattttccattttccattctccattatatataataggagtattgttgctttcctcccttttttcgtgtaccgacatggtgcccacaaaagaagtgaggcttatcgactcgctgaatggaaaagcgtatgcttatcgttaccgtaatctggactcttcctacaaatacgcctataaagcatatcggcaagtaaacctgtataagtcggggaaagcggaagcttccaataatctggggttctgtgctttcatgaatatggatttcgaccgtgccgaggcgtatcataaagaggtatacaaactgactaaaaatgagcttgagctgttgattgcagacatcggactgatgaaaatctgccagcggacagcgctcaacaaagaattttatgattaccggaacagtgccctccgacggatgaagcgtatccgtgaagagagcgacctctttgccgaccgtcacgaagcgcttcggctggattacgcatttaccgaattttttctcgtttcctccatttactattactatctccagcaacggcaggaagcgataacctctatcgataatattcaggaagacgaagcgttgagcgataccaatcagcttctttattatcattatctcaaaggatcggcttctttggtcgcagcgaatactccggaagaacggaaactccgcgagtttgacgaactttatttcacttggcggacagccgtgaagagcaagcatccgtattttgaggggaatggaatgcagggacttgccaatctgatggcatccccgtctaattttgagtttttcaagacaaggcgtacacatgcgttggatcagtttgattttccggtagattctttgttccctttgcgtttggcccaactggcactggagaaatttcgcgaatataatgacttgtatcagattgccggagcttatgtatctatcggcaaatacctgaatgcgcatggacgttatcaggaagctttggatacattatcaaaagcattgaactgcgtaaaccatcatcacatgctttattatcataatgaagtggatacgcttgataaattatatacgtttgccgagggagatactacttataccggagttccatggattggacaggagaaggtgaagaccgttcccgaatggatctcacggataagggagcagttaagcgtttcatatgccgggctggggatgaaggatgcttctgattataaccggaatatctatctggatattttgaactttacccgtcaggataaggagttggaaagccgttatttgtctttggaagcaggttcgcgacagatgacggtcgttctttttctggttattgtcggcttggtactggtgattatcctttggtggttcttcaacaaacgttccaaaatcaggaatcaggtggatgtggagcgtctgcaacggattctctctctttgtcgggatatcacttcttccataccgatgaacgtacctctgattcagcaaggcattgaccagttgttcgggaaaggacgtctgacgctggaaattccggaagaaggaaaagctgcactggtaccttcttcccatcgactgaaccgggacgagaaggcattggtgcatgtagtggaaccttatatcgtatgggctgctgaaaatgaacaaatggtggctacgttgagcgacgagcgaaatcagctggagaaacagcggtatatctacgagcagcatattgcaggaaacaaatgtcagaatctgataaagaaggcttgtatggccatcgtcaacgggattaatccttatatcgaccggattctgaacgaagtacataagttgacggaaaaaggatatattgatgacaccaagataaagaaagagaagtaccagtacattgatgaactggtgactaccatcaacgaatataatgatattctggcactttggatcaagatgaagcaaggtacgcttagtctgaacatcgagacattcagtctgaatgaattgtttgatttgctgggaaaaggacggcgtgcttttgaaatgaaaaagcaaaagctggaaatcgaaccgaccaccctgatggtaaaggccgatcgtgcattgaccttgtttatgattaatacactggctgaaaatgcccgtaagtatacgcctgaggggggaacggttaaagtatatgcgcatgctaccgatgcgtatgtggaaatctccgtagaagataatgggagaggactttcagcagaagatatcgcgcatatcattggtgaaaaggtatatgattcgcgtgctatcggcatgaaagacgcggcagatccggaagaactgaaagagaataagggaagcggttttggcttgatgaactgcaagggaatcatagagaaatataagaaaacgaatgaactgttccgagtatgcgtattcgatatagaaagcgaaccgggaaagggaagccgtttttatttccgcttgccttcaggagtacgtaaagtgattggcgtgttgctctgcctgttgcttccgttgggaatggcttcttgtctgcatgaaccccttccgtcgatattgcaggatagtgactccattgcgattactacagattctacttatgaagatctgcttgatgcagcctctgattatgccaatgccgcttattttgccaatgtggatgagaactacgaaatagcattgcagtatatagattcggcaatgatgtcgctgaatgagcattataagaaatatacgcgtaccccgaagccgcatcgatacatgaaactggtgggaaaaggaacccctgccgaactgttttggtggaatgaactttttgattcagactatcatgtgattttggatatcagaaatgaagcggcggtagcattccttgctttgaaacaaattgatgcctacagttataataattctgcttttacagatttatataaggtacagggagaagaccagactttggaagggtattgcaggcagttggaacgatccaacacgaataagacggttggtatcatcctctgtttcgtcttgctgatcgtttctctgatcggctattatctcttgtatatgaggaagatgttgcagaaccgtctgaacctggaacaggtgcttgagataaatcagaaagtttttgccgcctctttggtcagacctcagactcaggagaacgaggaagcgcttcagagagaggaaaatacacttaaagagattccgcagcgcatcgtgaatgaggcttttggctcagtaaatgagttgctgacaatcagcctgatgggcattgcagtttataacgaaaccacgcatcggctggaatatgcttcctgtcccggacaggaaatgccggaaatggtgcagcaatgttttgaaacaggggaatatctctcagaacagaatttgcaggcgattccgttgatggtggaagccggaggtgagcatcaatgtgtaggtgtgctttatctggaacggagggaaggaacgcaacaggaaacggatcatcttctttttgagctggtagcacgttatgtatcgattgtggtgttcaatgcagtggtaaagcttgctacgcaataccgggatatcgagtcggcacacgaggaaacacgccgtgcttcgtgggaagacagtatgcttcatgtgcagaacatggtgcttgataactgcctttcgacgattaaacatgagacaatttattatccaaacaagattaaacagattattggtcggttgaatacgcagaaccttccggaaaaggatgaacgggaagctgtggaaacgattacagaactgatagaatattataaagggatctttacgattctgagttcatgcgctgctcgacagctggaggaggttactttccgccggaatacgattccggtacaggagctttttgatgctgctggaaaatacttcaggaaggtcacgaaaaatcggacggaaaaggtagaactaatcatagaaccgatggacgccaaagtgatcggtgacgtgaatcagttgcgtttcctgtttgagaatctgattgatgaagcattggcggttcgtgaagaaggagtgatacgcttgcaggctcgtaaggataacgaatatatccgtttcctttttacggataccagacgcgagaagagtgtgacggagctgaaccagttgttctatccgaacctggctcgtatgacttccggcgaaaaaggggagttgaggggaacggaatatctgatatgcaagcagattattcgtgaccatgatgaatttgcggggcgcagaggatgccgtatcaatgccgaaccggcagaaggggggggatttacggtttacttcaccatcccgcgcagataagaaagaagacacataaaagttattagataaataaaatggaagaacagaagtttaaagttattattgtagaggacgtaaaactggaattgaaaggcacagaagaaattttccgtcatgagatacccaacgcagaagtgatcggcacggcaatgacagaaagcgagttctggccgctgatggaggcacagcttcccgatctggttttgctggatttgggactgggaggttctacgacgattggcgttgatatctgccggaatattttcaaacgttacaagggggttcgtgtattgatctttacgggggaaatactgaatgaaaaactgtgggtggatgtgctgaatgcaggagcggacggcattattcttaaaacaggagaattactgaccaagacagatgtacaagctgtgatggacggcaagaagctggtattcaactatccgattctggagaagatcgtagaccgtttcaagaagtcggtagcgaatgatgccaagcgtcaggaagcggtaatcaactatgatattgatgaatatgacgagcgttttcttcgccatctggcattaggctacaccaaagatatgattgccaatctgaaaggaatgccattcggcgtgaaatcactggagaaacgacagaatgacctgatcggacgtctcttcccgaatggagaacgggtgggagtgaacgcgacccgtctggctgtccgtgcattggaattacgcattatcgatctggataatctggaagctgatgaagagtaaatggcgtatgccgcatcccgctacgatgtttctgctgctgacaatggcggtggtctttctttcgtggatatgtgatatctacggactgaaagtaacgctgccgcaatcaggggaggatattcgggtgcaaagcctgctgagtcctgagggaatccgctggtggttgcggaatgctatcaagaactttaccggttttgctccgctgggcatggtgattatcgccatgttcggactgggggtggcccaacattccggatttatcgatgcgtgcatccgtctgggagtgggaaaccggaaagagaaaagaaaagttatcctgtgggtgattgtcctcggattgctgtcgaacgtcattggggacggcggttatattattctgcttcccattgccgccatgctgtttcagtgggtgggacttcatccgatagcggggattgtgacggcttacgtttccgtggcctgcggatatagtgccaatatcgtactgagtacgatggacccgctcttggcgcataccactcaggaagccgcgctcacactgatgggatatcagggaaacacggagccgctgtgcaactacttctttatgagcgcttcgacagtggtgattacagggatcgtttattgggtgactcagaaatggcttctcccgaacttaggaaaatatgagggaagtgtgaaagtcgaagcctaccgccctttgtcacggaaagaacgtcgtgcgttgatggtggctgtcacagtggcagggatatacgttgcccttattttgtggcttactttctcttcctatggtatcctgcgtggcgttaacggaggtttgatgcactcgcccttcattgccggtatcctgtttctgctatctttgggcgcaggctttacggggatggcttatgggttcagttccggtcgttatcgcagcgataatgatgtgattgaaggacttacccagccgatcaaactgctgggtgtgtatttcgttattgctttctttgctgcccagatgtttgcctgtttcgagtattctcatctggacaagtgtcttgcgattatgggagcggacctgctttcttcttttgagccggctcctttgtccgcactcatcttgtttatcctgtttacggcatttatcaatctgattatggtatccgccacttccaaatgggcgtttatgtctttcatcttcatcccgatgtttgcgcagatggggatttcgccggacgtcacgcagtgtgcttttcgtatcggagacagttcgacgaatgccattactcctttcttattctatatgccgctggtgttgacgtatatgcggcaatatgacaaacagatcacatacggatcgttgctgaaatatacatggaggtactccttgtgcattctggcagcatggacattgctgtttatcgtatggtatctgttgaagataccgatggggttataattcacgattcaaagttccggttttaataaccggaattttgagtttctgaattaatcgctatatttgcacccgtcccttaaagaaaaagaacgaatgaatttaccagaagtctctgaaaaactaatcgaacaactgaatcacggtagcaccaaagcatttgataaaatttatcatacgtactatttatacctgtgtgcgatagctgtttactatgtacatgacaagagagtcgccggtgaaatagtcaatgatgtcttcgtctctttctggcagaatcgccaccatatcacttatcctgcccttccgtatcttcgtcgggctatacagaatgcaagtatcagttatttgcggtcttccgcttttaatgagcgcataatgaccgaacagatggaggaaatatgggcttttctagaaaatcatattctttcttccgacaatccattgcaggcattggaaagcagtgaaatgaacgagatcattctgcggaaagtagaggaactccctgccaaatgccgtgctgtttttaaggcgagcctgtatgaaggcaaatcgtacagcgaaattgcggaagagcagaatattaatgtcgccaccgtcagggtgcagatgaaaattgcgctgactaaattgcgcgaatcccttggtactccctatatgatagctattttgatgtttctttaaaaaaaatcggttttcttttaaacgtttctttttttattgcgtatctagttatatacaccatagaaaaagaacggtttatgatagaatattacgataaagaagaactggaattacagattagtaattatttgtcgggcaatagtaccgatgaagaaaaagaaacgttgcttgcctttctggcttccaatgaagcagctgcccggactttccgggaaatgtctgccgtatgggcactttcttccgtaccgtcgtttgcagaaatagaaaactccaatttagtgcggataaaggagagaatgactgctcctgcctcttcgaagcctgtccggaaactgatacctgtctggctgaaagtggctgccgccgttattctgctgatcggctgcaactatttctggtatacgtatacggaaaatctgacggaagtatataccaacgccgattctccttacgaaatcaaggttcctgccggatcaagaacgaatatcgttcttcctgacgggacggaggtttctctgaatgcaggttctgtattgcgctatcaccgtgggtttggtatccgcgaacgtaatgtgacgttggatggcgaaggatactttaaagttgcgaaaaatgcagaggttcccttcttcgtgaagacgaacgatgtgcaggtgcaggtagtcggcacggtattcaatgtccgtgcttatgatgacgataattatgtgatggtgtctctgctggaaggcagggtgaatttatcagcgtctgctaattctgtgatgaaattattcccgaatgagcaggcactgtataacaagaacaccggacgaatggaaaagctgaagaccaatgcaagtaaagcctgcgattggctggatggcgggttgaccttcgagaatgcttcattcgctgatattgcccatcgtctggaacgtaaattccaggtgaagatcagcatagaaagcgaacgtctgaaggccgaacacttctccggttctttcgacagcaatcagaatatttatgatatattacacgaaatcaacgttgagaaacaatacacgtggaaagtcagtggtgacaccatctttattaccgataaaagaaagggggtaagataaaaggaaggagaaagaaaatggacacagccgatagatataccggcagtccgcagctacgataaataactatatgttaacctttaatagtgataaaaatgagattgataataagaaaaacattattgatgtttctgcttttgtccctaagtaatgtcctgacaggttttcaactttcagcgcaggaacaaaacaagaagttcagtgtcaaagcagataacgttactttgaaagaagccattgaagtagtcaggaagcaaggaaattattcttttctgattcgcaataacgacattgacctgaataagaaagtctctgtgaacgtggacaagggtacaattaatgacgtgatggcccaactgctgaccggtacggggatcagttatgaagtgaacggaaaccgggtggtcatattccatgccgcagtgcctgaaaaggaacagggaaaagcgtttgtcctgaaaggcaaagtgaccgatccttcgggtgaaggagtgattggtgccaatgtgaaagtgctgaattctacggaaggtacgattacggatatggatggaaacttttctctgtcggtgactccgaatgcacgattatccgtgtcttatatcggatatgctacgcaggaagtcgttgtcaaaaatcagactcctttgcacattgctctgaaagaagacagccgtctgattgacgaagtggtggtagtaggctacggtgtacagaagaaagcgaatctgactggtgcggtaagcagcgtgaagatggatgaagtattgggagaccgtccggtagtgtcggtcagcgatgccttgaaaggcgcgatgcccggtttgcagattacgggtaactccggtagaccaggagaggaaatgagtttcaatatccgtggtgtcaacagtctggataagaatggcaaaccgttggttctggtggataacgtagaaatggatatcaatatgctcgatccgaatgatattgaatcagtaacggtcttgaaagatgctgcttcttcggctatctacggggcacgtgccgcatttggcgtcattctgattacgacaaagaaaggatcggattcaaccaggctttctattaattattctaacaatttctcatttagcagacctgccaatatgcctcgtaaggcaacaccgcttcagacggtgcaggcttataaagacatgggaaccatcaactatcagagtggacagaatgtggatacgtggctggatttattgaaagaatacaatgccaatccttcggcttatcccgatgggtatgcaatggtggacggattgcgctatagtctggcagaaaccaatctgtttgatgatatgatggagaccggtttccagcagacgcacaatctttctgtaggtggcggcacgaaagatatatcttatcgtttctctttcggtatggtcgatgagaatggagtgctggcctcggacaaggatgcgtataaacgttacaatgtgtcttcttatatccgttcggacgtattctcatggattactccggaactggatatcaaatacacgaactcgaaatcagaattgccggagacttcgggaggatatggaatctggggagcagccgttgccttcccgtcttatttccctaccggaacaatgaatatcgacggagaagaactaccgattaatactccccggaatctgattaatcttgcttatccgacgactatccagaaaaacaatatccgtatcttcggaaaggtgacgattactcctttgaagaacgtcaaactggtgggtgaatatacatacaaccatctgagtaatgaaaagaccaagtttgaaaagaagttctattatgcccacggaggtaactttgtgaaagagacttcgacggcaaactctaagtatgaaaactccaacggcattaccgattataatgccctgaacttctacggaaactacaataacacatggggcaagcatgaagtcaccgtgatgggaggtttcaatcaggagagcagtgactatcgctatgcggaaatgtcgcgtatgaacatgattaacgaagaccttccttctatatcgcaggctacaggagattatttcgctaaagataaattcgaacgctatacagtaagaggattattctatcgtatcaactactcctttgccggcaaatatctgattgaaacgaacggacgctatgacggctcttccaaatttccgaaagacagtcgcttcggtttctttccttctgtctctgccggatggcgtgtgagcgaagaagcgtttatgaaaccgttgacatccgtattgtctaacttaaaattgcgtgcttcgtggggtaatatcggcaatcagagtatcactccatacgcttatattccgggtatggatgccgagcaggcttactggaccgtttcgggtatcaaggtaactacccttaaacctgccgcattggtcagtaacagttttacctgggagaaagtgacgactgtcgatgtcggttttgatctgggtttattgaacaacaggctgaatcttgtattcgattggtatcgtcgtgatacgaaaggtatgctcgctccgggagcggaattaccggctgtgctgggtgcaagtgctcctttgcagaatactgccgatcttcgttccaaaggatgggagatcactgtagactggaatgatcagatcggaaaagtgaaatacaatctgggcttcaacctttatgatgctaaaaccaagattaccaagtataataacgagacaggtctcttcggcaaggataagaacgataaagatacttaccgtgtaggtatggaactgggtgaaatctgggggtatgttacagaccgcctgtatactgttgatgatttcgatgccgatggcaagctgaaagcaggcattccaaaagtggaaggctataatccgaatccgggtgatatcctgtataaagatctggatgacaacgatattatcaacgggggcacaagtacgacgaaagatccgggcgaccgtaagatcatcggtaatagtacccgtcgttatcagtatggcatccacggtggtgcaaactggaagggggtctctttatctttcctgttgcaaggagtaggcaaacgtgatttgtggattatgaatgacttgttctatccgcactatgacgcatggacgacggtatatgacacacaactgaattactggacgccggagcgcacagacagctatttcccccgtctgtatgagaaagctgccggaaatacagctgccaatacacgtattcagacccgttatctgcaggatggttcctacctgagtatccggaacatcaccttatcttataatttcccgtccaagtggatgactaagatcggtgtcaataatctggctgtcttctttagcggtgagaatctttatacattcgatcatttgccgaaaggactcgatccggaacgttcggtaacggatgacttgggacaacgtggttttacctatccgtatatgcggcagtattcgtttggtatcaacctttcattctgattgtttcactatttaaaagagtaattgttatgaagaaatatatactgggtacgggcattagtctctgtttgctgatgtcgtcttgtttgaatgactcttttctggaagtttatccgaaaggacaacagacggaagcgacagtctttactacctatgataacttcaaaacgtatgcatggggattatataatgtattcttcggatatacgtatgatacggggcagacggacgaaatattccgcggagattttgagtcggacaatatgatcaaaggtttgtccggatatgaagggcagtgggcataccagaaggcgaaggcaacagatgaagtcaaggaatgggattacgactatatccgccgggtaaatctgatgctggacaatatcgacggttcgcagatgaatgatacggagaaggagcactggcgcagtgtcggctatttcttccgttcatataaatactttcagatgctttcccgctttggagatatcccctgggtggagaatgcgttgaaagaagacagtccggaactgtacggcaaacgggatagtcgcgatctggtggcttcgaatatcctgtccaacctgaaatatgcggagacacatatcggtgcggacgatggcaaaaacaccattggtatatctgtggtgcaggcacttatttcccgttttgccttgttcgagggtacttggcggaagtatcatggattgtctgatgccgagacttacttgaaagagtgtgtacgtgcgtcggaagaagtcttgaaggtttatccgaatgtacatccacagtatgacgagcttttcaattcggagtctttggatggggtgacgggcattatcttgtataaagcctatgaaaccggtcagttgatgcatggcctgacacgcatggtgcgtaccggtgaatcttatattgaggcgacaaaggatgcggtagacagttatctgtgtacggatggtcgtccggtaagtactaccaccagtcggtatggcggtgataaggagatttacggacagttccgcgaccgtgattaccggttgtatctgacgatatgtcctccctatatggtaaagaaagaaaatggtccgagcacggccgactggaaatatacggatcatgcgcaggacagagagtttatagatcttcttgctacaatctccggtgagacttatcatcgtttgccgtcttccaacttcaaaggattcacggtgcaggggcagccgcacttcaagaatcagaactggggacagggctggaatgcttctcaaatgggattctgggtatggaagtactataatacgcataccgtagctaccaatgccaatggagtgaatacgacagatgcgcctttgttccgtgtaggagaggtaatggtgaattatgccgaagccatgtgcgaattaggtaagtttgatcagacggctgccgataaatccattaataaacttcgtgcacgcggacatgtagcgaaaatgacggtcgaagacattacagatgattttgatacggcccgtgatccttccgttcctgctcttctgtgggaggtacgcagggagagacgtgtggaactgatgggggaaggattccgtctggatgaccttcgcagatggaaaaaaggagactatgtcaataaacgcccgttgggagtatatgtgatgggagcttcggctaaaaatctgaaagtaaccggcggaccgagtaatgacgaagggtatgtttacttctttgacgctccgctcggatggcaggaacattattacctgtatccgctgcctctgaagcaactggcactgaatacgaatctggaacagaatccggtatggactaaataattttttgagtaaaaacagaggcaagacctgtaatattttgtatattgcaggtcttgaaaatttaaactataaaatgaagaacgctatttcggtaaaatatacccttctttgcgggacagcttgctgtatggcctctgctgtgcaggcgcagcacaatgtctccgatgtttccagaatgaatgttctttttctgatggctgacgatatgcgtcccgaactgggttgttacggagtggaggcggtcaagactccgaatatggatcgtctggcatcgagcggagtcttgtttcagaacgcttattgcaatgttccggtgagtggcgcttcccgtgccagccttctgacaggcgtatatcctcactatcccgatcgttttgtgaatttctcggcttatgccagcaaggattgtccggaggctatacctctttccggatggttcacaaagaatggttatcatacagtttcggatggcaaagtttttcaccacatgagcgatcatgccgcatcgtggagcgaacctccctaccggaatcatccggatggatacgatgtctattgggcggaatataataaatgggaactttggatgaactcagaatcgggcaagacgatcaatcccaagactatgcgcggaccgttttgcgagtcagcggatgttccggatacggcatacgatgacggaaaattggcggaacgtgccattcgtgacctgcggcgtatgaaagaaatgaacaaaccgtttttcctggcttgcggattttggaaacctcatttgccgtttaatgctccgaagaaatattgggatttgtataagcgggaagagatacctttggcttccaaccgtttcagaccggaaggcttgccggaacaagtccgtaattcgagtgagatatatgcttatgcacgggtgactgatacgggggatgccgattttcagcgggaagtgaagcatggatattatgcttgcctgagctacgtggatgcacaaatcggaaaagtgctggatgctctggatgagttaggtctggcggagaatacgattgtggtactgctgggagatcatggctggaatctgggcgaacatgattttgtgggtaaacataatctgatggaccgttctactcatgtgccgttgattatccgtgtgcccggaatgaaaaaaggaaagacccggtcgatggttgagtttgtagatttgtatcctactttgtgcgagttatgccagataccacaaccagcagaacagttggatggacagagctttgcaaaagttttcagcaatctgaaggctaagacgaaggatgaagtctatattcagtgggaagggggagacaatgcggttgatcaacgttttagttatgccgaatggatgaaaggtgacgtgaagaaagcaagtatgctgttcgatcatcggatagataaagaagaaaacaaaaatagagtcaatgagaaaaaatataagagtaaagttgaatcactctcttcttttatcaaagtgaagaaatcatcattaaaaaaataatatgagaacaccaattatgtcatgctgccgtttgatggcagttgctttatttctgttttgcagtatgccgctatttgctcagcggcaggatattttattaaacgacaactggaagttccgattctcgcatcaggtgcagaaagggtcggaaataagagtagatctgccccatacctggaatacacaggatgctttgtccggaaagatcgactataaacggggaatcggtaattatgaaaagaaactgttcattcgtcccgaatggcaaggcaagcgtcttttccttcgtttcgaaggagcgaacagtatagcagatgtatttatcaatcgccgtcatatcggtgaacatcgtggaggatacggagcttttgtctttgaaataaccggagaggtgaattatggaaaagagaactctatattagtgcgggtgaataatggagaacaactggacgtgatgcctttggtgggtgactttaatttttatggcggtatttacagggatgtgcatctgctgatcactgatgaggcatgtatttctcctttgaattatgcttctccgggagttcgtctgatacaggatagtgtcagtcatcaatatgcgaaaataagggcggtcgttgatttggcaaatggcaataatgccggtcaggaagtagaactgggtatccgtttgctggatggtcagaaagtggtggcgcaacagaaacagacacttactcttgccgggaatgcagctttgcagcaggaacttacatttgagataaataatcctcatctgtggaatggccgtcaggacccgtttctttatcaggcggaggtttctctgtcgagaggagggcaactggtagattgtgtgacgcagcctttaggacttcgttattatcggattgatccggataagggattctttttgaatggcaagcatctgcctcttcacggtgtttgccggcatcaggacaggagtgaggtgggtaatgctttacgtcctcagcatcatgaagaagatgcagccctgatgctggaaatgggagtgaatgcggttcggctggcacattatccgcaagctacctatttctatgatctgatggataagaatgggattattgtctgggcagaaataccttttatcggtcccggaggatatgatgataaaggatttgttaatctgccttctttccgtgccaatgggaaagaacagctgaaggagctgatccgccaacattttaatcatccttccatctgtgtatgggggctgttcaatgaactgcttgaatccggtgataatccggtggaatatatcaaggaattaaatgagctggcgcatcaggaagatactacgcgtcctaccacttcggcaagtaatcaaatgggtgacttgaatttcataacggatgccatcgcatggaatcggtacgacggatggtatggaggcaccccggccgatttaggacgctggctggacggtatgcatagagattatccggaaatccgtattgccatcagtgagtatggtgccggtgccagcatttatcatcagcaggattcgttggtaaaatccgtgccaaacagttggtggcatccggagaattggcagacctattatcatatcgagaactggaaagcgatttctgcccgtccttatatatggggtagctttgtatggaatatgtttgatttcggtgcggctcaccgtacggaaggcgatcgtccgggaattaatgataaggggctggttacctttgaccggaaagtacgtaaagacgcgttctacttttataaggctaactggaacaaggaagaacctgtgctttatctggccggaaaacgtaacaccgtacgttcccgacgtctgcaaacgattactgcattcactaatcagcccggggcggaactgtttgtcaatggaaaaagctatggtaaggcaatgccggatcagtatgctattttagaatggaaaaatgtggagttgcagctgggagagaatgaaataaaagtagtttctagcaataaaaaagtaaaattgatggatagttttcgctgcaaactatagcataatgcaatagaaagcattacctttgcggtctatgtgtaaagctaagaaggagtccgtgaagtaaataacctttggcagtctgtcaaggttatcccttaattcatactctggcatattcttgccagagttattttcatattctatataataagtataatcgcatgtctataaagcggataataactatctgcaagatatacatgctcaaaaaaacaatgaaatgataaattcaattaatatacaaatcagagagaccaatacagatgatttcgacagcataatgactgttgaaaaacaagcgtttggctatgacaaagaagcacagttggtagccgatctgctggctgacaaaactgcaaaaccaatggtttcgttgctcgctttctacaaaggtgaggctgtcggacacattctcttcaccagagcctattttgatggtcagggagcacaacagatgatgcacattcttgcacctttagctgtcaagccggaatatcaacggcagggtataggcggaatgctgatacgggcaggtatagagaggttgcaggaaaaaggttcgtgccttgtgtttgtattggggcataaagaatattatccaaaatatggttttataccggatgcagccaggctgggttatcctgctccttacccgatactggaacagttctcggattattggatggttcaggcaatcagtccgaagggatttgatgtggataaaggaaagatcaggtgttcggatgagttgaacaaacctgaacattggagagatgatgaatcggacagatagttccctgatagtagtttgttaaaatagaggaaatatataaagatttaggtagctttattagtgcagcctaaatataagacttatttttgtgtggggctgtccaaaatcggacagccccttttttagatgtattagtattttctattatctttcatcgccttcctccacctcttaaaagccctcataaggctatcttcctccactgtaccttccatattataatgttccacaaaaagctccatcgagcgtttgaacatgattccgtttttgaatttattctccagcagaaattcatagagttccgccctcatttccacttcgatttccttttctatggttaatgcgctttcctgcccgatataattatatacttccggattctttccgtaggctggattaggcagaacaaacgtgatatttcctgtttcttttacaatcgccaaatcaaaaaattcccgaccgaaaaacaaaatgtgtcattaaaacacatattaacataaaacaaaatgtgatttttggtgcaaaattaaagcctgtttaatcatcgtttaaacaggctttaattttaatctatgatcatgtaaactgataaatcaggattggcaacaagcggaagaacatcctcatcatcaagaacgctcattgcatatctatgaatacttttctttatcatttccaacgttggtttttcaaggaatatggaactggcaaatgtcaccagttcgtttccttcgttatcggttctgtcaatggattgtattgcatatcgtattatccatgttccatcggataattgttcgatcggcttagccaatttccggggtaagatattttttcgcattgccttttcttatttgtttttttaattgtttcttaaaattatattcgttcttcaacacaaaaacctcccaatgtccctgaacataaaaatattcccaccatgcaggattaatacgtttcgccactttccgtcttagattgtacgtattgaaatgcctcattaatccatagtaggaattcagggtggcaacaaatttgtccgcgtgtgcttccgcaaagccttcctccgctattttattatatttgctgattacatcgtataaattaccgacaacacggtttgaaatataaattcgaccgggcaaaatgaatgcccctacaaacaaaactcccttagaatgatgctgtatatatatttttttaggatgtaatttaagaagcagctgctctttcaggtaactgtcaagcaaaggaacagtatttagaatatcttctttattacgcattacaaaggcgaaatcatccacaaaacgcacataatgcttgattcccagtatttcggaaacatagtaatcaaaacaagaaccgataaaatttgcgaatttctgcgcatgaagactgccgggggcaaaaccatgatccggatcagcatgaaacaaacttttatcatgaggcaactcatcccataaatgtaacggtgatttcctataacatttatactgtggctggtgaaagataacagtgcgcaatatatataataaacactctatatcgtcgcctttatagttatcccggataaacaggtcgatcatttcccataacagggatttggacattgacataaaaaagcttttgaaatcacccttgaaaatgtatgcgtctttcgtataattttcactgacttccatgatcatcccattcagatagataacagccgaaagtgctccttcaccaatacggcaattttttgaaacatttccctgtgcctgaaaacgctcttccaaaataggatcaaggcgtagatcagcccaatgttgtattacacgatcaacataagcggaagcaaaaatttcacgaagaacgggctttttccgtatgaagcattttgaataatcaggttcgtagcgaccgtatctgatagcatcccacacggcaaccaaatccgtgtcatattcaaacgaaaactctatgcagtcatctgtattgcgtttattcttgcaacagacgtcaaatgcatgcacgatggaagataagggtatgtcatagatcggtttatctgttgcggaaacgggacgaaccctgcctgcgttagtcttgttgttcgtgttcacgttgccgttgttcatgttcacgtaccacgcgttcgaggattcagcattcactgtcttagtctttcccggttcatcaccgggggaatgcccaatagataaattagattgctctcccataaactccgtgaagattatggctctggctttacggaagctgtcttttcctgggaagcggtgaaattacgccaccctataatttgcttttcaatcgacgtaatcatctcaatgatgtctgctgtcgtctgaatattgatcagtttccggtctcgacatacccttaataagagtttcaatgtatcaaacttaacaaggaattcgttcaggtattccactcgacgcggaaggcttgaatttgcataacggatcaactcgcaacaacgaagggcggacatcataagttccgtaccgaattcgtacctgtaattcttcggaaacttgtctcttgcatcaagtatcaacattaataaccgatacattaattgatagactggtctgtcctctgcttttcccatgttaatttttgatatttttaaaatttttcttttgctccgcaaagttaatgattgtcaaactattaacactcattttttcagaattttaaaacttaaaaagcccctaccggggctaattaaacgtaactatctaagagataaagagttaaagagataaagaatctattgcggaaacgggacgaaccctgcctgcgttagtcttgccgctcgtgtacacgttgccgccgttcacgtgcacgcaccacgcgctcgaggcgtcgtattcggtgctgctccaataccagtcggctgtaattatattttgattacctgatacagaggataataactcattgatttcggtcttatatttggcgatggtaatgagttctccttcgctgggaagataccactcggttttgtcttcaagtccgtccagttcaagcgtacaagccttatagttctttgctgcttctgcggctggtgcaccgacgacaccggaattatccttgactcctgcagtggcttctatgatagcatcagtattttgctttccgtctgccgtttcataaagcccttgattaccgttcccgtaattcttaacgccacggatgtccgtaccgtatgccccccatttgaaagtacgcccgcctatatcgtcagtgcagtcgcttttcgctatgacgaactggcgacgatccgcacggatacggacacctacacgcaggtattttgaacggttatttgcgctaagggaattccattcttcagcagtaaagaacacgttgacaccgtcttcgatccggattgtggcaaaggacaggtcaagcagcccgccagcccatctgatatattttgcaatgtcactggcaggcgtattttcgttcacgttggtaaaaccgatctcctgcaaaacagatacctgttcttctttattcatgcgcaaaagcaatgcgctttcattattcttgtctgtcataaatatgtactgttttaatggattactcttctgccgttgcccttacatgcaacaggcttgtatttttattctgtacgttcatgtgcccggtattcaaattgcacgtccatgcatttgtcgtatcatagtacgtgctcgtccagtagtatttgtccgtcaggaacatgctgtcactgctccaaaatgcacgcagcatttcattgatttggtcacggtatcgatacatgatcatcatctgtccggaagaaggcaagaaccattcagtatcatcctccagaccgtcgccatcgagtgtgaaggctttataggctacggcagcttccgcagcgggtgcgccttccacaccgttcgaatttgtccctttcagggcatcaaggatcaggcgtgtatcttctttcccggtgaagcaggtgtacattttgcccagcatctttgcggaaagcccgtcaatcgctttaccaagaccgccccaatagaagctggaagacaagtcagctgcataacactcttgtgccgcaatgacaaaagactgcgaatgtgcccggatacacaaaccacgacggataaacttcaacttgttggcaggagtcaacgagttccactcctcacgggtaaaataccatttggaattatcggaaatccggttacatgccacccgcatgtccagcaacccggtagcccactttatccggttagggaactcgctggcacgcgagttttccgtaatgtcggcaaagcctaccgcctgcaaggcttttacctgttcctgtttattgagacgcagcagggttgcgctctgttcttttgtactcatgttatttgctgtttactatatcgttaatatccatattttcttccgcaaaccgttgaaggtattcttcataggtttcaccattataatagtccatgatttcacccacattatccaatgtgacttcgggataatagggttctccgccatacgcttccgcattaaaccagtcgatgatcttgatataagcgtcgattatggtgctgacggtcagaccttcgaagccgttccggatcgcttctatatccgagttctcgatgacttcatccagcagatagttcccggtaagtacgggcttctctacctgattaccgttttcatccagtcccccgataccgagttgcaggatttccagcacttccgaaccgttcccgatgaaatcacggtttgtgatacggatatggcggaatacgacattaccttcctgcgaatcgattatgtcgcggatcatctttacaacgtcgataagcgggcagttttccacgcgcagtgtggtgatgttcggcatggattcaacaacgatgcctgtgtccgcgttcagccccttatagctcaacttatcgaggttcatcaacttgaactgtgtcatggtggtcggcagttccgcatattgaaccggacagccgcctacaaaattgataatctgcagggaactgccgtatgccaacaggcgcaaaaggcgtgttgccccggtcaggtcaagagataccagctttttgaagttctcaacgttcaggagtctcatgtacggtttttcaccaagcgggaggtctgtgacgctattgttggcatatccttcgcgtttgctgccgaacaccagttcctcgacacggatcaacgtagtgaagtcttttgcctgtgtaccgtcgatgttgacagtgctcaaatcacccaaagacttgatcttcgatgcaccgatgatatagatcgcgctcgatgagtttgaaccgtcgaaatggaatgtcacctttgagccgtcttcttccgcccatgccccctgttgtgcggctggcgtattgaagcccgcccacaatttccattgctcgcttgcggtcacttcgatattgatgtcctcaccgatggcgcggaacatgcacatattatccgccttcaggatcgtgctgacaccgaaataagcgtcaaggaagtcataacgggcagacacatagtaatggcggtaagggatacccataccggagatcacgttgaacgcctgaccgcccggattggtgatatacttcgccacggaatcacggcaagcgacgatcgcagggatcaagaggtggtctttttcttccgattcacgcagaacggcttcgtaggagaaagcggactcgccacccggaaggcgcgatgtgcggattttctccgcggtcgctgcaagtccgacctgatcataacgccacatgccttgccaaacgacgctcatacgtccggcaaatacgttttccccctccatgacgctgtcaagcatcacgttatacggaagtttgaagataccggaattattctttccgttcgtactgtccgaatcataatcgtggttcatgtaccaacggtaaataccgtccgggcagaggtacaaagcccacatgctgtttttcgataactggtcgacgcctgaatgatacaggatacggactaggtatgcgcggaaagaagccacgctgcaatacttgtccatttcctcaaccagcttccggtatcggttttcgagcgtatcgctgacctgtgcaccgttgatactgattttgccgcctgccatacggttcttcgggttacatgaatacacccattcgcagaactgtttccagtggtacggtgtcttctttccaagcgcataggcaaggttcatgccgtcatcgtccggtgtacggaattcaaagaacatcgtccatttgggaacaaggctttccgttgacagttccgcaccgtacaagcctttcacccacttgctgtgcgtcgactgcatagtcatgaagttgtcgatatcatcgaagatgcacataccttcataatcaagcatttcaacacattcaaccggattcaggacacgtccggtaacgaccgttttcctgccgttgaaagagattgttccggtagtgtttttccatgccccgtcgacgtattccatgaacttgtacgaagcgtccgtcgatttggaaagcatgtagatcgtatcctgatcgtagtcgtcagcatgggacatgaaataggattccgtcacgtccggaaggtcggtgaagtcgccataactcaaacagtcggcattgtagccgggaacatccttgaagccgaaagtcggtggatttcccttgtcaatgttccagtcaccgcgacaccaaaagtacgcgtcattgatatttccggtatctgatttgaagacaagcacactgttaccgtcaatacttgtacgcaagtccagcgtgttgttttcatccgcatagtacgcgttctgcgctggggtcatatattcctcgcccaaagccttctgcatatcgttattgatacgggaaatcggggtgtttaccttgtcgggtgatgcatagttgaccttcaggcaaaccttgtcgaatggaatagtctcaccacgcaaaatgattttcttgtttacaatcgcgtcgagcaaagcctgcggagcccgttccggatacatcgcacggataattgcctttttcagcttgtatttcctgttcttataggttggatagaaggcggatgtcgtaccctgattggtcgtttccacgttctcgaaaataagactcatacctttgtccttgcagaacagatacaggtctgtatatatcttggtggacgtgtccgttacgttgtcaagcgtttcaagtttatagtccccgtgtggcatttcgaccagacagtcgcacatttcaagtgctttgttcaggtcgattttattgtcggttaggatatcgttctttttgttcaaagcgatcatttcgtccgtatcagatttaccgatcacaaattcatcgttaatctgttcgtccgccatttccttttcccaggagagcaagcggtacatatacagttccccggctgttccggagaagctgatttgttcggactgtttgatcgcgctttgtcctgccgtatatttggatgcgccaatcaggtcaccgtcacaatatagcttggtatagcctttgccgtcctcttccgcatttgccttttcaatgacgaaagcaaactcgtagatgtcgcccggcttgaaataccgttcgatcagttcagttccgagtgctttgaagtacacacattttgaagtgatacgccacccgatttggtttgcttcgtcccagcatgacacgacgttcgcgtcaggatcggcagcgttctgcgtctttatcttgatgatggtagtcgatccggtctgctcaatgttggtacggttatagggacgataagtacacaatgcggtggcatcatccgaaaccttgaacgccttcccttcgttcttgtcggtgacaaaggcattcgtggaatagttgaacccgttctgcttcatttcataaagtccgtacagccatgacttgtcctgatccgaattgtccttgtctgccggattgaaataaatcatatagctggaatcaccattgatgtcaatgacggaactgttaacggagtactcaatcgtattgctttccccagcaccgcatttcccgtaaatacccaacgtattcctgatattgtccgcaatagtaaagccatcgacacgggtggacagattgaatgtactgttacgtcctactgatacggtagtcagcactgtatcggtttcactgttgtctccggtagaggtattggcaactttcgcgaccttgtgtatttcgacatgggcatcggtagcgacatggctgggatcatagcacgccacttcgatgttcaggtttgcatacttcttgactgaccatgccgtttccgtttcttcggaatgcgcaagcgccacgataggcataagacttgacgggttgacaatcatcacatcaaagaactggtagttcgaccatacgcccgattccacgtcctgtgcgacaatcctgacagtatatgcaccatgtttcagtcccaaagacgaaacgttgatttgcaagtcctgtgagcgtgtggaagccacgctggtttgtgagatcagcttccattcgtcgcctattttgatatgtgccgtaacggttgacttattggcggaagacagtttgaacacgtccgtcatggtgatgagtcccgaaccttcctgcaatgttttgtacaaagcccatacacgggaaagtttcaggtttacagccgtgacgctgattgtcttctgcgcggtatttcccccgtcatcggtggcaacgaccacaaacttgcggttcatcgcttcgctgaaatagcttttaacggaaatcgcaaaagtgtagtccgtatctgacggggaactttcccggttcacgttgaacgtttcaagcgtttcccccgttgacttgtctttcagttgcagggtttcgatattgttgtatgaaaccatttcacccgatccggtacgtgacaggatcgcaagcctgattgtcaggtcgtcagttccgagtgcggcatacagggaggtcttttgcggatagatatacacgattgtcccggcaacgcccccaccgccaccagttccgactgcaaaggtgaaaccgtcgcccagcggaaacccttccgcgtccttcatgtacacacgcaccgttccgtcttccgcctgttcgccatccacgtcgacgggcatggcatcatagaccgcaccacctgctaccgggttcacgctgtccttgatgatttcggaatcggtttcgactgttcccccagcggcagaaccgaagtcgttccatgccgccaagtcattataatcggcacgggacgcgcacaactgtttggactcgaatgtttcctttccggtgcggtagatgataaccacaccgggtttgatgcattccgtttcatttgccgtctcgtaagctgtcagggcatcgatagccgtttgaagaatatagtatccgtttgataatggcgcaatttcatcgaccagcagcactgcgcctttgcccgtcatgtcgccaccagcaccaccgaagtccgtccagttcgcttctgtggcaaagccttcaagggatgatccggcaaactgtttggattcccattcaccttcagcaattttataagtcaatacgatacccggtttgcggtaagtgacattatccgcattctccctttccgtaattgcggcaatggctgcggacaaggaatagacagagccgccacatatttcgttgacattgataacggacagggctttgttagccagcgacaatgctgaagacgcggtagcctgtgcgtcttcagccgatttctttgccgcttttgcagccaagtccgcagacgcggctaactgtatcgcgtcggagtcggcagaaagcaaagccccggcaaagtagatgtaggtcttgttgccgaacaggtatattttattctcgtgcgggtgtgtgcggtcggtattcatataggcatcaacacctttccagcttggataatacttgttgtcaacgaagcaggcaaatttacccagactggcgagaaatacaattttaccgtcttcagtaggcgcattggactgctccaacacaatggaagagtcggttactatttcgtcgaagcgttctgttgagtgatgtacgaaatctaccattaatgaagacacgtcctgtgatgtgctgtcggcatcgtcagaaaggcttttaagtttaccccatactgtcccgtcttcgctttccgattccgtgccgatattatcggacagctttccgatattttcattcgcttttttagcggattccgcagcttcgttggctttcttttgtgcagcatcagccgtattctttgccgtttctacatcttctttttttgcatatacggaaaggttgcctgtcgttgagacaagtttccaccccggattttgaaaggcgtagatgttaccattgtcgactgcatcgggggtattctcgtcatacaccgtcacgatctgaccgaatttcaacggctttccgtcagaaccgaccggggaagtactgtccgcgttcatctccgcgacggtggtgtatgtgttacgaatccccaacccgatctggtttttctccgcttcgttgatgacatccagcgtttcatcaatcaagccgcccacttcttcaggtgatatggataaggaatctttctttgccgaaagttcctgtgcccgtctttttaattcgtatattgttgccattatcagttaaatctttaatgtatcctcgattaaaatagtacttgcaggcatttggacaagtgggctgccatctgctgaagctatataacagttgccgttatcgaatgtgagttgaacaatcattgattgtggattatcccatgaatctgcatacgacatcgatagactgaacactccggaaatattctttacagacgaatcaaatgtacataatctccgtttgccgttcacttcaggagctatcatggaagttcctgtattggcagcagccaagatattaaaatagacagtttcattgcccgtctgttttgcccggtatatgatttctgcttttccggaaacgacttcacttagggataactgggctttcatgtccttttctattatggtcttgtccaaataatctgtgacaatagccaatattttgttcctgaatgttactacatcatttctgcctacatacatatctgactttgtatatgttgttgacagttttacatacctgcgctcatatacttgcgcttcggaattgtccgcaaatatttcattttgaaatttttcctgaacaaccacccagtatactggttgtgatgtaggcacagtaagaatatccggttttatcggataaacttcatcacctatcacgatatatccatttccgacaatagtatacactgtattggaaccaaggatttccgtgctgaccggatcgcttaacagaatatgtttctctcccagtttcatcccggaacaaatggctttcaatacgtctgctgtggattcttgcataaattccaaatcatccaaataaaatggctgtccgccttctttaaataacagtttattcatattcgtatattttaaggacgtaggttcgtccggctggtttataatagtcaatcaagtttttaatctcattctcatacgttgacaggaacgacggtatgttcaccatgtaatttcccgaatagttcccttcaccgcgctgctggatgtgtttctttcccactccttcaccccgtttatacaggtaggacgggatttgctcttccctgcggtgatacaggtacgattcttttcccgcaatatcagtgatgtatatttccctgtttttcaagaaaaacctgtcgttcagcactttctcgatatatatcacctgaccgtttatattcagcttgttgatagcctgtttacggtagcttttaaacagggtgtaaatgaagattaaagggagaaggaagatggatatgattgcaaatatcttccttttcctcaatgacggacgaagcacatactgcgcgtatttgataatgtcaaaatcataccacataagtcagggaggtttcaaggctgttcaggatgaagcacccggctacagccgtatagttattatttttaattacgttatattccgtagcggatgccgcttttgcggcacattctccaagttcgacgtccagtacgccttcaaccctctgtatcgcgtcaacaagttttgtcttattgaatttaccgccatactcgatacctttcagataatcgttgatggcggcaagtactggtttactaccatccgtcaggcggataccggaagcgttgataaccataggatcgacttctatggtcgcgttgatacggatgtcatctgccggaattgactgtatcgacaagattaccccggcaatcttgatcgaattcatatagcttttaaatgccgtcagaacgtccccggtcaaaggacaaggaagtcccccctcatctccggacacgagtatctgaatacttcctccgcgatctttgactgccacatacttgacaagctgtttggttttgtcgataacggaataccggaactggtatttctccggatcatagaccagcggatcaccatactggaaagccagcgcactgctatgataccatcgcacggtcggtatgatattggcgtcaatccgttcctccacgtccgatttgaactggtcaaacatttgctctatgacgtgcgctgttgccgcaaaaatgtaaaacagggtactttctattgatacgggggaaaacaccgaatcaaagtcggcatcacccgtgatgccatacaggtcacggataatgctgtttgacatataggcatccgtcatttctttctttatttctgcgattgttctagccattacttaaattgttcggtaaactgttcggtgaaaattctcaatcgtaccgcatttgaggcggtttcagaagtagccggacaaacggagttccgctggcagtaatcagccagttcactgttatagaccttttccggggtttcgatttcctgtccggcttgtagggtgtccgttatgcccatatcgttcgtcctggcaagcatgaaagccgcttcgattgtaccatattcctgcacggctatgtccagcagggtttgtccggcttgtactacagttttcatcttacatttttataaataaaaaatacaaatgcaataaaaaaggctgctattacggcttttgcccacggaggaatgtacgcgaccttttcaacgacctttgtatcattcctctcctgtttttccagttgctccttcaatgtcagcagggtttcctgaatttcctgtatttgtacctgaagttgttcattataggtttctttctcctgtctggtagacgttcctgtcgctgtctccgtggaggtcgggtattgtttcccggtcgaatccggtggcgaatagttcgtcttctgccagttgaattccatttgctgcatcatctcgatcattcgctcaacattcttgtttacgctgacctgcgctttgtctgtagaaacttcttcctgttccgtctgcttctgttccgtgttatcctgatggacggtcgtgtccgttttggacgatcggcaggaacagacggacagcaccacgattgtgagtaaaaaaacgagtatctttttcattacggtcgaacgattacaggtggtaaaaatgaggtaaattcactctttacgtcgaagcagggacattctttcatccactcgcatttttcgacgatgccgttcccgttcttgtccggactggtatctcgatgcccgaggatatcaataatgtcgtggcggtggcagatgtcctgaacgagctcgcgcatcgctttcttctgtgcgtccgtccgggtatcctttgccttgccgttcttatccagtccgccctcatagcagataccgattgaacatcggttataactggttttctcaccgggaacgataaagttatcatgtgccccgatttcgttttccgcacgcatgggaatcacgcgaccgtctttccggatataatagtggtatccccattttccaaagccacgggctacgtgtgaatcattaatttgcttctctgtgaaatctttgtcctcgcgtgttgcagaacaatgaatgataatgtatgtaggtttattcatctttcttttcctccttattttctgtttcgtcttctccttgaatgtatttcttatacttgcatttatacctgtaatcaactccgaagagtgcgcctgcaaaagtcgaaacttcgccataggcgactaaaaccgagttgtcaatctgtcccgtaggtactacccaaaatccgcaaaacagcaggatcattccggatacggacaggaaaactgcgatccataactgtacgtgtagtcttttcatgatacatacaggttatagaatcagtcggaaaactatccataccagtaatatgaccacatccgccaacaatgccccgcgtaccgtcgcccggatgtctgccatatccggaacatcgtctttcgattccttccatttaccagccagccatgcggatacagttcccaaaaccatgccgcccaatacgctagggaagctcaccccaaacaggaaaacagatgctaccacgcacacggctaaaatgagcatcccaatcagtccgtgaatgattttgtctactccgaactttttaatcagatcgttacttgctttcattttcaatcattttaatcgttagtaatttcaatatttattttatccaccagctccgaatagtcaatgcccgcgcgtttcaggtggattttcatttgtttctcaatggctcttttatcagcctgtgaacggatataccggatcaggttcgcacccagcaccgggtcttctttcaactcaccctgattcagctcaagcacgattgccgcattttgaatcagagtgtcaccgattacgaacccggtcagcccgtcttttcccttatgggggacaattctgatatcaccatccttgtcgagtaatagtcctttcattgcttcaccctttcgttttcaatgtccctgacctgtgtctcttttagtgattccgaaatgtaggaagacaatgccgttttcaaagccgatcccccgtcgttcggtacaggtgtccatcctgacaatttctgcttcaatgaattgatgtccttttcaatcaggttcagccgttccgtcagttccccgacttttaccagtccgcccaatgtcccgccattcagcacaatttcgtccacctcatcagcagaaatcaggaaggcgtcagtctcctgtccctcgatgattccgaccagacaagttgttcccggtttcggatagatgcataatgcacccattcccaactggacatcataatattcaagctggtcaatgaccccggtcacatccattgccttgttttctttatcaaccttgtctaccgttacccagcgcaattgcgcctgtctagccccttcgcgccatttttcaagcgcatcacgtaactgttcatccgtagtcattccgcacgtcctcccaactctaatttttgcctgtatgtagcatcgtcactgaaatcctttgtcaccttctcaacgtaatagtatccgttcatttccggagttatttcactcttcaggtcaatcgttataccgtggcggacgacaggtatcccgaacagttcgacgcccccgcggtacttctgctttttaaggctttcgtagaaatctctggcgaacttcttcaggtcttcgaccttgacggactttcctttttcattgtaagtcaggttatagacctcacttccttccgttccggcttttgcttccagtttcttgccgccagcaccgatgctgacaaccttgacctgaaactcaccgttggtttcgttcaggttctgactgacggcatttttttccagtacgattttcaccttttcggtgtcgaccttttcggaatagacatttccgcaatacaggactttgccgatgaaatagcagtggaggttggttttcttccggatgtcattcaggatttccgcgaccgttctggaagaataccgtaccgcaccaagttcagcatcatagttcgtcttcacctcatagcctttggcaacgtctgcaagcagtttcttcagtgtgacattctttgcggaataggacactgtttttcttttcaggttatacatttcgtcctcgcaccggatcgtcactggaacaccccagccgatcagcgatatatatccttcaaattccgtgtacaggttggaatcatatccgagttcaatcttcacctgatccccggcagacagcagttccttcaggtcttttccggcaaagtatttgatacgcctgggaaggactatttctgcagagtctgtcagcatcttccatgaactttcgatgtgaaccgacgaaatcgtatagatgaccagttcctcgcgtctcttgtttgccgggaatgtgatccggctgcacatcatatagctcatagtgtcagttcataagggttatcactcgttgcttctatcgtgaacggaactacgctgctgtttccctgaatcggattgaacgaaatgttatcaatgacaatggagtaaatttccttgttgttgaagatgcttcccgtaactccgaccgcttccgtcactttgcggaacttgcagagcgcgttcacttgttcggcaaccgtcttataaccttcccggcttttgtctgctatgcagaatccccggatattgattttccagtcgtcgagcccgtagacttcctttacagttccgtgaacacccaataccttcgtttttgaacagttcatcgagcgcgaaaagtccacgatcgttgcatacggcatcggaaaactagccatattcatcgtgccgcgtgacccgtccggattataggtgctgtattgcttgttaccgtcaagggtaaacgtcccgatgaccggagtccccatccagctgtatgcttcggcttcggcatccggaatcgttgtcactccgatgtatttccccggatcgtaatcctgcagggttcgtccccacggaagataaatcggggatgaaatcccgaagacctccgtgaacaatgcaccaatatttaacgctgtatttcctgtcataactttatcctattgctggtactgtatcggttatcaccgctaaaatttcccgtttgaccttatccgcaacatcgcgcatgtccgcacctgccgcaaccctgaaatgattgttgaatgtcacgttcatggtgatattcctcacgctgcttccaccttttccaccaagtcccacgtctttcccggaagtccccccggttgaggttgtgacggtggtcggtttgttgactgccgctggtgcggtgtccagctggaacttgtcaagtccggggactttgtccttgttccgccagctttcccgtcccttttccttgccttcttcccatgcccgaccgactgccacagcgttgtcaaacacttctttctttacccgttcaaatacgtcgtcaatgctccagtcatccctgaaccagttaaccggattcagaatttcaatgattcccatttggatggtatgaatcgtcttgaaaaaggaaagaaagcccgttttaaggacttcccacagcccgaacaggaacacacggactccttcaaacttgttataaaggaaagccacgaaagcgatgacagccgttatgattgcaacgatccagccgatgacagggatacccatgatagcgacggaaatcagccggctacccacgattgtagacaatgccattttagccatcgacgcaacccaaaccccggcaatctttgttattccaagtgacatgatctgcgaaatagaccatgcgacagttccgagcgtgacaagcgcgcctacaaagattcccacaacttcaatggcaggggcaatcggttctacaaattcaaagaaactgatcttcaggtcgtcgataaacgcttgcatacgtttctgcttttcggcataagtatccatttgtttatttgccatgtcgaccgcagaagtagaaccctgtatcgcttccgtccatgtgtcaatttggtctacaccctcaatcaaagccatcgctgaagcaaggttttcacttccgaacaacgcggacatgattgtagcgttgtgcatgaccggagtcagggcacgcagtcggtcagtcagtgaaagggactggttttgcatcgtttttatattgaccccggcagctttcagttgcttgatcgcgtccgtagtcggagcctgcaatttgactatcgtgttacgcaaagcgataccgccttctgaaccctttttccccgatttgtcaagcaactggatcagggagtttgtttcggcaaattcaaccccgaatgtttttgcaacactacccgtttgtttcaatgcttccgcgacctccctgatttcggcagacccttcgacagttcctgccgccatgatgttcatatagtccgtcatagtttgtgcggctttcatcggatcatcgagggaaaccttatactggttcatggcggtggacatggctgcagacgctccggggacgtcattttgcatcgttttactaagtgtcattacattattcgacatgatttcgagcgcgtccggtgcttttttcagttccggagtaatctttgaaagcaagtccttataaacgaccatagcatttgacgcatcgacaccgaacgcttttgccgtgttacgggctttggtggcgagaacgtccagttccttcccctccatgttggtgataccggacatttcggcaacggcagtttcaaaccggacgcccggttcgatggcgtcgttaaaggaatcacggatattgtcaacaccttccttcagctggttgagaaagaacattccctttcccagcccttccagttttccggctgtttttcccgatgtctccccaagacgttcaaccacttcctccgtgtcgtcgattacccgtgtagcttcttcggctgcatcggttgccgcatgtagcggagacgtgatcctgtcaaccagttccaatatccattgagtcacttgcattgtcttttgagaataatcggtttacaactttagcgaatgcattgtgcattactatttcaaattcttccaactccgttttccgcaacatgcggtattcggcatagagccggagccattcatcttcgtccagtttgtccgggatgtcgaagccatatacttttttcaggatggcatctattccctcgacaagaccgaacgctgatgaatattcctctatgctttgctgataaaagccgcctgtccggcaatcagttgtccgatggcggtcaggactgaagtatagacggtagaatcttccaacgcctccatattgccagccgccacgcagttccggatcaggatgtcatttgcttcttcaagatcatcctttttctttgccatagccagcaggatgttttttttcgggcggacgatcaggtagtcgtaacgttcatcctcgtccacctgtacggtgacatgcttcaggcgttttccgtatttcagtttcagttccgtatgctcttcctctgtgaaatcgacaatcaaagccttttcctccgttgtcagttcctcgtaaggctttccagccttgattttcatttcttcttctttcattttaaaagtcttttaaacggttattaaactacattgccacattccagtcgatatggctgggaagaagggtgaattgtgtggcaatgcttttatcaccctgtttaacgtccacgccattgtccgtgaattcgacgttccggattacgtccttcatgacaagccctttatactcatacatgaccggaatgtcgaacggctcgatatccgtgagacgctttcccgaaccgagtgtcagttgcaaggcgttcacttcttctttcagaagggtgatcgatgcttcagccttgtaattcccctcaccgcgaccgacaggaaattcaccggcaccgtagatgttgtctttctctttgctgtctttgtaggaaagggctgtgataccctctacctgacgaccgagcatgacaaccttgacgctgttccatccggctatttttccgaacttgttgattaatgttcctaacaatgccatattttcagattttatttgtgaaacccaagtcaatctcaaactcatgtacaataccgtctgcaaccagttttaccttgatattgaaaggcttgtcgctgacagccatctgtttgggattgatataaatgtcgaagtctgcaatatcctccgaagttaccatagtttccagtgcggatttgacaagcgcgtcccaactgctgatcgtggtattactgatatatccggttgacgggtcagctttcaccttacttctcacacgcggtaacaaggtattgcggataatacgtgccgccttgttccaaacagcgttatattcaatatatgcatagtcgctgtccgcttccgtacacgtacatgaattgctgaaaaagaatccggcatacccttgaaagctgccgacgaagatatacccttggtcagtcagttttttctggtcggatacgctcaactgtgagaagggtttgccattgctcaaggctgcatccagccaaagcccgttcagtttgtcagtcaatggatagtcctttgtcccctttgccgtccgtgggtggttttcaatatcaacactgcccatattttcatgtacatagcggacagacagcattccgagtgcgcttcctacggcagcgtgtgtccggtatgcttcatcctttgccgcccgtgccgggtcttgtgcaatcacgacagagacgttttcagcatccaacttccggaggtcgacagcatcggcaatggcattgatatactttccgacaccttccaatattaccgcatcgatatacaggtggtcttccctgaatttattgaccatcttctgtgcctcttgtacggctactgtgattgtttcgtccgcagtcagtgagcagataccgatggtgtttactccgttgatggtacgtaccgcattgacgaaatcttccttcgtcagcaggcttgacactttttcagacttcggaaccagcataagatacagcgaacgttccggagacaggcggaagacttcgctggtatggtaatgcaccagttccttgttttcaagatcaatggtatcatcccaaccaagtgcttccaaatcggtaatgtcgttgaggttttccggcttgtaatattcaagttttccgatctccgatccaccgaccacgagcaagatgatgcggtcactggtatcggtatcccgtaccagcccgccattaactttgttgatgattactcctgtaaaatttcccataaaataattcgttatacggatttacctgataaaattgcaccaacaccgaaatcttcaatacggtctacaataccgtaggtttgggtacgatattcggatgtaggactcttgctgcgtgtatcggtcgtttccggacgatacagggatttcacggattcgatgtggtaatacgtattcggagcatagaagaacgtgcttgcctgaaagtccgtttcggcagacggttttgtgccttccgccaccttcttggctgtttccgcattatagaacgggcagtcgttattctcaaagaacttgatacccatgaagcctttcggttttccggttgccggatcaaggtagaaagtacggtcatagaagtacttggacgcatccttatccagcaacaagtcacccatgtgcaggggggaaagcaccatgtacagggcatcggtaacgggaaggttccacgtctttgcgagcgttgcaaaatcgaccagatccttataagacagtctcaaacgaccattaatatctttctcacccgttgtccggataacaggcatttcttcgtttgaatcatcctccggagccagtttgtgcagcacatggttgcggataccgacctgaaaggcttcattgtgcttcacacggatagcagcgcgcttgtcaaaagcgagataacggatttcgtcatccgtacaggaactgggttccgtatcgtagatttcccacggtacgatataattctttccggtcatttgcttcggctcgaaatcttccgtgttgtttacgcgaaaaccgacattgttaatcagtttgtttctgcgtacaccgtccgcagccaaagctccggcaggaacagagcctaagacctgcatgaagtccgccctgtaattgcgacgttcgatcaacagttggggatcgacgtacttgttcaaataaagaccgtctactggttgtgccatattcttttttttaaatggttagtattttattttccgttacgctttatgtagtcattcaaaagacgttcgtattcagccggattcttctccatgatatttttcaaagcctccggatcgttttgaaggtcttcgaactttttgtttgtggtatccgtcagactgggagcatgaacttccggcatttccacaggcttgatagcgtcgagcagcttctttgcggtatcgaaattgctggtcaggttcgccttccagtcgtcacgaacgtcggctgtgattcttttttccttgatcgcactgttcaggatgttttcgatttcctgttccttgcgtgcctcctcctgtctttcgagcatgtcgacgcggtctgccttacgcttccacacgtctacctgtgcgatgaattgtgcttccgtggtacttgcgtccattccgaagcgggtagtcaacattgttaaatccatgtcattttttgatttttcgttattaatagagtcagtaatctcaatttcacctgtgtaaccgcagttggtaatcatttgtgccatagccttatcgacttttgccttgcctgtaacttccgtcacaaagccgttttccttcgcttcctgcgcgctcatccagtagtcgcccttctcccaggcgtcccggattttcttcttgtccgtgcactttgacaggaaggcattcagatagtgctcattcagtttgcgcatgacctccaaagccgattcaatatcagcgactctcccgcatgcccctccgctgacctgatggatcatgaaaagtccgttggcaggcatggagaacgatgtgcaattgatagcgatgtaggttgccgcactggctaccagcgcaccgccttcacccgtaattttgccgggaaacttcttgatcacgttcacgatctcgttggcttcgaagcattcgccaccgggagagttgatatagatatgcacatccttgattcctgatcttatcagttgctcaattttggaagtgaattccgcttccgtctccctccattttgatattgtgcctttgagttcaatccgggcacgtccgttttccgctgttgcagtcagattcattttcgcgatatttaaaatttcatactgcaaaattggaaaaggaaaggcgggtacggaaaaagcgttttcatcttggaaaaaaaacagtgttaacaaggacgtattttttccaacttggaaagaatacgttccaacatgaaaagccgttttccacaggtgatgatgaaatatgacctttgctgcgtaaacgaaaggaagcgatatgccaagcaaagaatactaccgtaaattgaagaaggaagcgcacgacctttatgtacgtgaaggaatgacgtgcaaggagatttccacacgaataaacgtgtcggaaaggtctgtttcaagctggattaatgagaatgacgcactttggaaaaaagagcgtcaggcatctgttatttcatcgcaaaagcagggtgacaacctgaaacagattatcaacattcttgcagaccaaaaactggagctgctgcgcatgattgacgaagccattgcggaaggtgacagcgacaaggtgctcgaactacggaaacaggcggctacgcttgacaacagtgtggcgcaatggggaaaccagctcaaagaggtggacaaaaagaaccggattacgctcgctatttacattgatgtcatgagccggatattcgatgcgatgaaggtgtacgatgcagacctttattttaaaacactggactttcaggagaaccacctttatgaagccgcaaaaatgttgggataatgaaagtcgaagatagcaaagccctcaaggagtatcaggagaagttaaaacgtgcgcggtgcacgggcaacctgattgatccggacgaatcgctgacagttcggatgaaccgcatacagcgtgcgaagcgggatgtcaagtatcttgtcgaaacctatcttccccattatgcgaccgcagactgtgcggactttcagatcgctcatgccaatagggtgatgaacgatccaatttataaaggatatgccgaatggggacgcggacttgcaaaatcggtatggaacgatgtgatcattcccctatggttatggattaacggtgagacgcattatatgtgtatcgtttccgacacatttgaccgcgcttgtgacctgctggaagatttacgtgcggaattcgaggcaaacgaacttttgaaacacgactttggcgagcagtataatccgggatattgggaaaagggaaacttcgtaacgatgaacggctttatttgcaaggcgttcggtgcgaagcagaaggttcgcgggcttcgtaaaggcgcacatcgtcctgacctgtggataattgacgacttggagacaccgcagaccatcaaaaacaaccggatgcaggatgattatgcggactggatcgaagcggacgtgctggcaaccatgacgggaaagcgcagacgtctgataggtgctaacaaccgttttgcatcccggatggtacagacgattctcaaacaacggcatcccgactgggactggcatctggtgaaggcttatgatccggtaacgtatgaaccagcgtggaaatcgatgtattccgcccagttctatcgtcagcaggaaaaagacatgggcattctcgcggcacatgcggaatataaccacgtaccgcttgtcaagggtaaaatattcaagcccgaaatggtgaagtggggaaagctccctgaccttcacacgatgaatgcgatcgtggcacattgggacattgcgtatgccgggacagatacaagtgactttaacgcatgtaagatttggggacgccataaaaatgatttttggctgatagacggattcgtaaagcagtcaaagatgaaactctgcgtacaatggatgtgcatgaagcaggctgaattcagggcaaagggcattatctgtttttggcaatatgagagtcaattctggaatgatgaagttaaacggaacattgaggaagctgaagcggaaacgggggtggagcttaatttggttccaatacaaactcccaaaacgatgaccaagttgcttcgtatgctttccatgcacccgtattatcagaacggtcgtatgtatgtcaatgaactgctaaagtcaaaccctgacatagctgtcggcttaaagcaattgtatgcggttgaaccgggtatgacagaacatgacgacagtccggatgccgatgaacaggcggtgaagaaacttgaaatatacactgatcccccacaatcagaggatgaacccgcgtcacgaccgtggaaagcgggaagatataaacgtaaatacacttggtaactatgaagtacatcaacatggatgatttgacaaccatcatacagaatcggttgctgatcgaaagtatagagaaagaagaagagatactggcagggattgaagaccttgtcataagtgaagtgtgcgcctatatcggtggtcgttacgacgtggggaaaatatttggtgatcctccgatccggacagggttgttggtacgtgtggtcgcatgtatcacagcctgtcgtgctgtcagccggaatgcaacccgtaaagttccggattccttgtcgggcttgaacgattgggcggacggcatacttgtcaaactgcgcgacgggatcatgactttgccacaggatattcccccggtaacggatgaagacgggaacgtgcaatatcccatattatacgggcacacgcgcaatggtggatggtttctttaaatagtttttaaaccgcttttaaaaggtatgttatgtacaagaagttaagagaaatattcaactggtttcaacagaaggctattcgtcggatgagcctgaagaatatactcaatgagtattattatcgaatggacagcagtgggttgccaacgtcaggaacaatgtataaaaggcaggctgttgtttatcgggaaaagaccattgacgactggatcatgtcagtgaccgcagctaccgatccggatgatcccaggcgtggtttattataccgcttttttcagtcgttatataacgatgaacatttgcagacgaccattgacaatcgcgtcttacctgtgcaacaggcaaaatataaccttgtggatgataatgacaatgaagatgaggaagcaaaaaaattactggatcgtccatggtttcaccagcttatcagaatctgttttctgcatcagttacagggggtatcgcttgccgatctttcccaccttgatgataatttggaaattagccatgtcgaagaaattcccatgtcaaattacattccacaacaacaaatcatcatcagggaggaatcagaccagactggatggtcgtacaaagacggtgcgcttgaaccgtactatgtacaattcgggaatccgtggtcgctggggatgctcaacgaactggcggtcatcattcttgccaagaaattaggattgggggcatggatgaattatatcgaaaaatatggtgttccgcccgtctttgttacttcagacagaatggataaaaagcggatggacgaattattcgaaatgatgacggacttcaggaataatttctttgctgtgctgcaaggaaacgaaacggtcgagtatgggaaagaagccgggggaaatacaaccaatgcttttttaccgttagaggaacgatgtgacaaccagatcagtaaacgtttgctgggtcagacgggaacaactgaaaacggtgcgtgggaaggtacggcagaagtacatgaacgtgttgaaaaatcgcggcacgaatatgataaaatgttgttccagttttatttcaattacattatcattcccaaactggtaaagatcagcccggtatacaaaccgcttgaaaggctgaaactgaagtgggacgacacggaaagtttgtctatcacggaatacatcgaagcaatcaacaagctggcttatacctttgagtttgaccatgaagaagttgctaaaaaaacaggtttgccgatcattggtcaaaagaaaaatcccggtggtgagcagcagggaggaacattgccgaatcagccccaaacagaccctcaaaaaaaaaagaccgaaccggacgatgaaacggtaacgtcgcctgtcatggaagccggggagtatgatttcagcagtatcatcggaagagtgatgaaacaggtttacgaacgtaaagttaagacagggaatattgacggggaattattcagaaagacatacgaggaactgaataagaaggcggctgaaggatggggagaagacgactataatgatccggaacaggcggaagaacctcaacggatacgtgacaacttgttcaagttctccggagcgaagacgtatcaggaaattaaggagatgaatgatgccctttatgatgataaggggaaaaaactttcttatgaggacttccgggaaaaagtaatggcaattcataaagactataatgaaaattaccttcgcacggaatttgaaacggcagaaacaagcggcagacgcgccagtgaatggcaggaattcaaggagaatgcggatataatgcctaacctgaagtatgtgactgccggggatgaacgggtaagagaatcacataggatactggatggtgtcgtaaaacctattaacgatccgttttggctgcagaactacccgcccaacggatatcggtgcaggtgttatgtcgaacaaacggacgaaccggaaacacctgctacgcctattgtgacgataccggatgcttttgcgaataacgtaggtcaatccggtgagatattcacggttgcacatccttatttttcaatgccggacaatgacctgataaaaatcaggaaagagacggagcggaataaaatatacgccccttatcatcgtgatccggaatcgaaagtgatgatcagcgactttgctgatccgaaagacttggcaaagaatgtggaaagcgcacgggtaatttcaaaggaactgaagatgaaagtaaaaatccgcccgcacatcaacgaggacggggtaaagaacccggaatatttgattgacgaaaagctggcagacctgaaaaatattcaggggctgggcggtataaaacacgggcttgacagttcgaaaaaacagcagtgcgaatatactgtattcaatttgagcgcttttgacactgtcgaaccggaaatgctgaaaaacaaactgaacggcatatacaaactgtatggcgaaaagtatgccgggcagcggatggtgttcatttataagagaaaagccgtgaaagtgtcatggcaagacgtggtggacggaaaagcaaccgaccttcttaaagaacttcaggagcagtagccgaaactaccactcctgaagggagctcttgacctgttacagccgcgaacattgcaaatatacaattttattttgaaatgcaaatggaaagaactgaattacctgatttttttaaagaattatccacactggtagaagatgcgcaccgctacgcgaaagttgcgggtgtgaacttcttcaagcagaattttcgcaggcaggggtttcttgatacatcactgacaccgtgggctaaaaggtcactcgcaatcggttcggatcgtggcgtattgatacaaagcgggaagctccgtgacagcatacatgcggtcagccgtggaatagaccgtatcatttatcagaccgatccgctggcttatgccaagatccacaatgaaggcgggtacattgtcgtaacggagcgaatgaaacgttatttttggtatttgtacatgaagtcgaccggatcaatgcaaaagaggaaaaatggcgaattacggcaaaataaagccaatgagcggctgtctacaatggcttctttttacaaaagtatggcacttaaaaaagtaggcagcaggataagaatccccaaacgtcagtatatgggtgagtccgctacgtttatgaagcaactcgatacatggatcgcatcggagattgacaaacgattctcgaatatttaatctatatagttatgatttggacagactgctacaaagaactggttgaaataatacggagcaaagatgagttcctcgcatctatcccggatgagtattccgagctaagggaacggatggaaaatacaccggggattgaacatatagacatgtggcatgaacaggttagttttctcgatgaagaacatcccttttcgtccccggctgtattcattgaatttaatacgctgggtattgaggatgaagggttactcgttcagcggcttcacacgcagattgatttccggctgttttacgaaactttttccgatacctacgaaggtgcggctatgcaggaagaggcgttgtcctttcttgacctgttgacattgctggggatgatgttacacggaaaatcgggaaagaacttcggcacgctccgacgtacccatgtcggacgggaagagtcggggggtgcgggaaacctgtaccggatcagctttgaatgtgaaatcatggattacaccacaatggaacttgcaagccatgccgacatgaaagaccgtgaaatgaaaattagcaatggggacttaccggagaaaacggaagacgaagaaccgctgtatcatctatgatgcaacggttaaaaaccaagactaagttgatttgtatcgttcttttttgaatcgggctttttgccctcttttaattgttcgtaatatgataaattctccgatatataaaaaatccgtttgtagatgtagttctgatcaagaaagaacaggtcatgactcatacgcaaaagaacatcctccaaacggatgcgctttttatcatagagaagatagaacgtttctaccatcttccggtcacgtattttggtcatttcaggattccgcataagaaagcactattataagcgcaaatatacggattttcagtgatttgtcaaaattgaatataagcctgtgggggaaaggctataaaaaagcccccagcctgttagtaaagacgccaatcacatactaacaaaatgcgagcagacgcacagccgggggcaaaaacccttgctgcgtctactcgcatttttgttttatgtgattggcattgcaaagataatcaaatttgtattattattataaacattcattttaaaagagtatgagcatgttgaaagaagaaattgcgggtatgactaccggatatacagtaaatgcaccacaatgggtgactacgttcacaaaagcaccagagtttaagtccttttataagaccgtctccggaaatgaaggaaataaatgcaattacccgacacgtttagacctctacggctgtggatgctttcacgactgttcttattgttatgcaaagtcactccttaatttcaggggactatggcatcctgataatccatctgtttcccggacggacaaagtggggaggaagatctgcaaattagagcggggaacagttgtgcgtttgggtggaatgactgactgtttccaaccttgtgaggctgtttacagggaaacctataaagcaattcagaacctgaaccgacaaggggtacattaccttatcgtgacaaagtcctcaatggtagcagatgacatatatatccggttgatggatagaaaactggcgcatatacaaatatctgtgacttctacggatgacactctttcacgtacatttgaaaaggcgtgtccgccatctgcacggattaaagctattgagaagctgcaggagcaaggatttgatgtctctgtcaggttatcaccatttatccctcaatttattgattttagggttctgaacagtatcagatgtgataagattctggtggagttcttgcgggtaaacacatgggtgaagcaatggtttgatattgactattccgaatacaccctgaagcatgcagggtataatcatttgcagttggagcgaaaaatcgaatatctaaataagatttcaggatgcaggaagatttcagtttgtgaggacgtggatagtcattttcagtactggaagaagaatgtaaactacagcccgaatgattgctgtaatttgagaatataaaattaagccgcgcaaagattttttcttgcgcggcttttctcgaacggataatcatttgtagaatatgtatttttcttcgcaataaatgcaatgattttctttgcaatacttctcaactgccttgcgcgttttaaagtcttttacttttccgtctttcgattgaatatgccccacattaaagtcttcatctatctttaggggaacaaaccttgtttgggtattaaatcgtttcatgtttatagttattctttttccattaattttaaaatcctgttgaactcatcacggctcatattggtaggtacaaaagatgcttttacctcttcaaacggacgaagagaatgttttaatgtttcttgagcttcctcccttgctttttgggcacacatttcaatatattcttcatctgtcatattataatcactaacagtatctatcaccgttgagaatcggcataaaagcccattcttttgtcttgcaataaagctcatctattttgttttacttaaaattaccactctactttatatacgccattccaattctcatctatagagaaacgtattttatatccgacttttattagtatatgtcgtacatacgaagacagatttatgaatgtgtgcgaatgttctccacgttctttcgcctcttcgattattgctactacttctgctatatataacattctattcctttccgtattgttattagtcaattatcaaaatttcacgatatgcaatgtctatctcattcgtcttctcattctcattgaaacaatagcaaagaaaccatttcaacgcaccttcattctcatattgtgctttccacattttaccattatagagagctgacggtcgagaacaagtataatccatgagtatttcaaaatcaagtctactcatcactgcatgagtatcatcaattagtatcaagtaagttggcggctgttgccaacacatcccataaggatgcgtcataggtggaataatattatctttattcattattatcttgttatacgttatttttctccttgtcaaattcagctaaaaacatctgtaatcctacccccattgagcacacaccatcgaacaacttatacatcaattccggctcttcttcccaaatttgatagactattactttttttcctgctcctttcatccatcctgcctccgaatgtgcagagcgtccacaaggcaatacaagaacacaaacatctgcccattgcattgcatcaaaatcagatttgaaaccagcctgtgcaatgggatgttcaagcgcagccctatattggtctgtactccaattccgccaatcttcatcaatctgtgaccactgaaatccagtttttccagcaggatgcctaaaatcgtaaacctcatgtccctgctcgcgaaggaaactaactacttgtggttgatgttgatttctccaactacttgctacataaatctttgccatattcttattcctttctaaattaaatattatcaaaagccgatctttcccggctgttatccctttattttaaaactccacaataagccaaaaccgataaggaggtaaatatacctattactgatactaaatatagaatcagtagatcctctaagctattatcttttttcatatccaatttaatcttctactattttatcatctgttagcaaacgtttcattgcccggtctctttccgcttttgaaggataattgtccccataccttttccaactatccggatttatatcgcttttaaaagtgatatgcggctgggggtaatcatggcgacgcaggattgtatagccggctttgcacagttttctttgatcttttgcattcatctttttgctaattagaattaaacttgattctggcataacgatagaatcgtatataaccaaactggtaggaagggtgctccgtattatccgatatggtaatttgtacattataaccttttattcgtaagaaacgggcagcaatttcctcaatagtgtatgtttatatatatatatcccaatcactaacgaccaatatcgttttcacattcccacttttcagaatccttttaaaatttctgatagtgcgtattatctccttcttcttgttcatactttagttttatcctcttttaaaatagttttataggcttcttccatccgttcaatctcctccacacatgccagccatccgggaaaacctccgatgtttttgtcatcgatatagcaatgggcatatatctttttcccgccttccccatatttagcgacattttcaggatcatggtcatttacacggtcgaatggtattttgcgttccaacagccagttgatggcattcaataactgatcaccagtacggcatgtccaaataatgattttatgtccttcatcatgtaatttccggagcgattcaccagcgtatggttgctccccgtcaatagccgggaatctcccccggctaatggttccgtcaaagtcaactgctataatcataatctacagaatgaaggttcaatacgacgccatactccgttctcgtcacgcttatggaaatagtaattagttgcagttttatacacgacattactttctttaaacagttgcatgatagaggcatattcttcatcaaaacgtgactccaattcatataatttgctgatagacttatagtccaaatccccctgacggttacgttcgagaagcgtcatcgccatttgatacatcggatcatcgactcctttttccgaatgggctatataattcttcaggtagtcaatcagcctttcggcagcgagatcggcacgttcatcaaaacttttcaccttgttgctttttacctccagtttgaagttcccgtctactactgaaaaagtggcggtttcttcaccctgacgcatacggagctgaccgtattcacgcatcacgttacggaaagccttgctttcacccacaatccaatcataaaagccctgaacatcattcactactggcatgagtttactttccacatcgaacatgaactgatgtctcaacgcttcgtaggtttccttccgctgaatggactctgttttttcttcctctttcagtttacgcaacagttccgccttttcttcttttgacaatttactaatatccatactattaacttttaaatgattaattacaatttgattttatatacttctttcagttcccgttccttgttttccgcttcgatataaagcgatgacctttggtctaccaacttcgcaaactcgttacgattcatatttccggcatacaatttttcgtgtatggcatccagctcaccgggaatcttgtcaagccgatccagtaattcattaatccggtttatccggtgttgttccgcactaatatccgccatcttctttcttttttaatattgactccagcttcggtatcaacaggagaagttcttccccgtccagttcgcgaaacttctttcctgctatccgggtatcaaggcaaaacgcattcaccgctccccagtccgttgtgtcgattccgatccgctgcactctcttcaggacagccgatctgcgtctccttatttcccgttcggtgatggttagatcctggttttcttttttcgcaccgttcaaataaccgcagagatacattgcctcgctgtatgtcaactcttttgtggtatttgtccgtccgtctgtcaggtctagcaggatagcccgcttttgttcgtcatcaatgccttgtgcgctgtatatgatatgcaggcgtttgataaggctcttactgataggtttcttcgtcttctgttccatcattatcgcttttaatattttcaatccaatatttttgatacccttccgcccatactatgtaatatccgcgtgaacctcctttgccacgtccgataaatgttgccttgaaatgttccacgtagattcttttaaagctgtcacgtttcacgtcataggctgtttttccttccacctcgcgcccgtccacatgcgagatgaagacaaatatctttcgcggatacttcttgcgcaggcggattatttcgggggctttcgctcccccttgctgctcgaagtattgtatggagtctatcattatcacgtccgggctgcgttgctttgagaggtattcgtccagttctgtgatggtggcttcatccgaatagattatattattcgttttactatgaatgccgacactaagaacggaattcacgaagtcgtcgcacgcgcccatttcaagtgttaaataaagaacccggagccccatttcatcaaatttgcgtgccagctgcagagcgaaagaactttttccttgtcccgactttccgtaaatgatccagcaaccggatttttccggacgaccgaatgccagataccattcaccgtcaaaatcaatatattcatgtcggatgtcttctaggttcttctgactccaaactttcatgccagttctccacgctcgatttgttgtttgattatacggtcttcgatcatgccggacagttcacgcaaatcatcggtaaaccaaacatattttcccggcacaggctcttttttctctttattcaactttccccaaatgttttcctgttcctccgtatcattgatcccgtttgccgcgcaaatggctttgacatccttctttgtggctcccagtaatgcgatgtagttccggcaaaatctgccgtctatttcgtcgtatccttctacacgaccgacataacgctttatattgcgttccagcgtctccgttccggctacgatagcccccaaacggtgtaaagtatcatcatatagaggtatcaacgtacaaagggcactgtgcgccagttttccggcatcatcaaggattaacaaaggggattttccagccatgcggtttatgtgtgaaacaaccaagtccataaggtcatcgttatccatatagcgcgttaccgtttcccccatgcatgtggctaacttggtcaggaatttacgtgccgtccacttccggcatttcagatatatgactgaattatcagtactcatgttataaaggtctatgagggattgagtcttcccactgccggatcgggaagatatgcacatccatttgtgattccgtttggctgccacgaacgcggtgcgtacctgctggtaactggtgacgctttccactacattccaggcgttttcgtagtaattaagaccggaagcgatcttttcagcgatagagtcttcgttagctccatacttgccgcttctgaattgggacatggcggtatccgatattccacatttacgcgccaactccgttgcagatgatccgcgattgattaacttctctatgtacgtttttaatgcttgattatccatgttgtatatcttttaaattgtttttaaatcatcttgaaaaattcatgtccagcgggttgtaatcgtaatcttcatcatccgttccggtggaagccattgctacactttgccgggtgatatgttgggtcacttccatgaaatccgcgtccgtggcgtcatccctcattttcgaccggacatccttgtgctgtcccaagctgtcggttatcaggtagcggtcaagaaccgttcctgcagctatttcggggatacgttggcaaatggtggtgattctcctgtctacctctttcactttctccttcaccgtttccaccatttcagtgttgaacctgtcgacacgtgcccggtattcaaaatgttccggtttctgatcagccaaagccatcggaactttgatatcacgttgcagtacgtattgcaatgtcccgatctctttgtcaacacgaccggacttcaggcgttttgcgttcgatacaagcacctgactcatatcgtccgggtcaaagcgtactatccagtcttcgttgtaatggtcgcggagggaaaggtcgaagctgtcgaagcagattcgttcacccatgaactcgataaacagtcccgaacctgtgatcttgtttgtgcgtccggtggtttcccccatgagcatcagatattcctcaatcccgaaaggcattttgcgggcttcttcggtacgttcccatgcagcgcggtaagcatctatcttctttgcccgttcctgcgctattatagcctctaattgcgcaataacggtggcttcatccgggatgaacttgtgattctggtttaatacttccaaattaggctggttatctttgtcggcagtgataccgaagcccgaccagttcgcctgtttttggcagtattccacgttcagccgtttgaaatagggttctacaattttggactttgcatttcccaaagcggctggtgtatagtacttggtcatggcttcatagaagggaaccatcaccttcttttgataattgtcgctttgtagctgtaaaggcttatagcgttccccaaatagctctttggtatgttgtaccgcatttcgtaatgcttcacgaataagagcgggtgattcatggtcgccaatggcataccctaccggatatttttcacatgcgtcaagtacgactaccatcgttttccggttggtataagtggtgtacatatatctcttttcctcaccgtttttctttaccgttttgggagtctttttctggtagaacagttccgcatcccatccgtccagcgtccagtaagtaagtgcttgtgtcggggcttcgcggtgtatctgtttcatgcgtgtgttcttcagagctttgtctcccttgtttcccgccattgttgtgagagcaaatttttgtctccagttctcaacggtggtaggactatcgatcggtttccaatccatcagggaagccaccttgttgtattcttccatgatttgaacattattcagattgttatgcatactgattaatttatgcatcactgcctttgcgtcctcgttcagtacgactgccgcgtatttgttgccatacgatttatggatgacactgcgatagccttcttcctcactgatccgtcgtgccgcttcatattgctcgcatttacgtttcaaagccttccagttcttcggcaggttatgaggaaaaatatcacgcccgttcgggtctttcagtgtcagaagatcattgctcaacttacagagcttttcccaaacgttgatgcgcgtaccaccaccgcctatcgagttggctttacgaccatcgcgaagggagaggagcgcgttcatgatgcgcacattaagggtatattcgtcaatcttcgcggggggaagcttcttgtcaccgtcatagcggtatttcacactgaaaaactcgtaggcggcattgctgtagacaatcgcatcttccagtatggatttctgtgttttagcggcaatttctgcacggggatcacctttacgtacaatgtaccctttctttacgtcctttctcatggtttcaaaatctactagggcaggacatccgggaataccacgacggagtacgataagttgcccgttcctcaccatcgaatagtatgttccttcaggaatgaacccatcttcactcccaacttgcgttttgggattgaagatgattaattcattcgcaaacacgcaaatccgattattaaatatctcagccataataattatactattaactttagcgcaagtcccggcactgccccaggattgtagctgcttcccctcttttcacctgttcccattgaaaacctgtcctaacaccattaaataataccatgacaaattcaatctgaaaccatgagtctgtgttatcccgaaatacggggaagttccttgcttgcatacttgttttactcttcgtccttttccgaacggaattccctttcaagaatggtcactatcgtgaaacaggcaataacaaaagccgcctgcacattagaggcagacacctcaatcccgtcaaccaatgaaacggtagttattatcccgaccgctatcaacacattctgaatcactctaaatgttttcatatactatatcgtttttcttgttctacattcatgtttctaaaaaggctattcctattcatcacgaaccggaatagttttgctacatttgtagccaatatggaaaatatttaatttaaataaaccgttatgatgtttttcgatgatttggaatctaaacttgcatcagaccaaacaatatgcaagagtatactccgagatgtaaaatgtcctgttcataagctaaaggcacgtatcatctatgattacgacaaagacttcacttatgcccatattacgaaatgctgttgtcctcaatttgcccaaatagtggcggatacgatccgtaaaacagagactattgatgtagtagtaattgacgactgtgaatatactcgctgaattggacaactttctcactgaaacccggcacgtgtcaccaaccatgaatagtttcttcttgaatctggcatggttgccgaggcgtagcacatcatctgctgttaagttatcacccatgacaatggcttgaaaaataatgcgatctatacgtttcaaaatcttattcttttgcattgcagatttttatttattgcttattactcttgttacatttccgtgagaatccaaaaccttcacttttgatggttcattaccttcagtatatttaattccaccattttcttgtgccattctacgaatagcttctgcattctttccattccgtttgaaacggagtatttgactaagatttgcgagagatattccaaatgtttctgcaatcatctttcgtttttcggtgtctcttaattcaattatttgtttcatacctttttattttagagtaattattcatacatttgagcgctgttaatctgtaacacgctgcaaatataatagagatatttcaattatgaaagaaaacatgagagatttttcagtattaaagcagagaattctgcaatatttagattttaaagggattacaaagtatgaatgttataaaaatacaggcataaccaatggcgtgttgagtcaaccaaatggaatgtctgaagataatttattgaaatttctctcatattatagcgatatctctacggattggttgcttgctggatgtggttcaatgttgcgtgatgacaatcaaacgaaaatttctaaaatcgttccaatagagtcggaatttgagtcaatccctatcgttgatatatctgtagctgcaggttatggatgtgaaaatcctgattttatagaagtcgtggagactattaggcttccttacaatatgctacgtaggaatagaaaatatttctgtgttaaagtacgaggagaaagtatgtctccgacattattagactgttcatatctcattttaagattattggatcgaagtgaatggaatgagattaaagacaatcatgtatatgtggtaagcgacagaagtggacgtgcttacgtgaaacgcataaaaaatagattccgtgaacatggttttatagtttgtacctctgataatgttgataaagctaattacccaaactttaatttgatggaagatgagattaatactatactatatgtggaatggtatttaagcgcaaagatgcctaatattaacgcgacgtattatgataaagtaaaccatttagaagacgatgtggatgctttgaaaagtcaaatgtccctacttatgaaaaggttaacttaatattaaacattatattttattataaatcattgttttttagcatattaccaaaaatatctgtattcctaaaagttgtattatagggtataactcaatgcatataccagtattatagggtaaaactcaataataaaaacacttcttttttaatgggtgtttaatgggtgatattcacattttgtctctattttctaatgggtgtttaaagggtgctgacatgggtataggctattttaacaataaattatatcttttccataagtctgtatttatcacgaaataaacaaaaatacatcctattttcttcatttatttcgtatatttgcaattagaaaaacttccatatagcaactatatagaagtttttagtattacaaatatctaaaagtaaagtcatggctaaagagactaaggttatacatgttcatctcattttcaaaaaaacaagccgtttttttggttctatatcagcaatctattctgaatttactgctgaagaaataggtattacggaagaaaccctacgtcacaaagggttgtccgatggtgtttccttcgctactaaaaaagcgatcatacaacaaggagtgcttattcgaagcgcacgaaaatagcattttaagccgctgtaatgtatttctatatctaaattaataaaggctatacacccatctaaatggagcgtatagcctttgttttaagcctaaaaacagaagcaacatacagtctttccttcgccttttcaatctgtctctcattgtttccctatttacagcacagtccaccggaatgaatatagaagcaacggaagcaaaatagaaggaacggaactttttgttttcttcccaaatatattgcgtgacattcgtcaatcaccgatgtacaggcggtttcacgtacttcaccttacatttcattcatgccacattttgtattgagccccgtactttccaggatactttggatggatgcgggacggataactgatagagaaaatgatagatgggagtgatgtgagagagatggataggaatcggttttcggagagaggctgacgaagaaggtgaggggcgactttcggattcgggttctaaactttgtgcgtaacgtacgtacatataccttgccagatacggcttgatggtaatcgtaactgtaaccatgggattttaattcttaattgtaaataaatattatatgcatcagaccgcttcgggtcatgaattccgttttgtttgttgagaaaaatcccatgggttacggggacggaattatgcttttataagaaattgaaaatcaaatagttacaaatacctctttttggtttaaaaccaaagggccgttcctttaaaaccaacgccccgtttctttaaaaccaagagggtgtttctcggtgagaaacggaggtattggttaaaaccgaagtgcaaagctaggacgaatattcgtatttttcaaaataaggaaaatgccggttgatattactgtgtaatgatatgagaattatccgctaccaattaaaattgcgcgtatatacgcggggattgatgttgataaatagtacggtttttgcggttgagcgtttaacaaagtttattacaaacaggcgtttttcctttgcctctctttttttacgtgcctcccttgctctccggaacatctgtccggccgttaccactcttcctgaattaaataaaattaagaatctctgccggacgaagatggaattttcatattttcgccctatacttgtatataaaataactagtgatataagatgaaaagtaagaatggatttagccggtgtggggaactatacatcggtcgtttacaaaaagaggggcgcttttctacagcgcatgtctataagaatgcccttttttctttcagtaacttttgtggtacgcagaacgtgtcgttccgtcaggttacccgtgagtgtctgcgccgttacggtcagcatctgagtgattgtggtttgaaaccgaatacggtttctacctatatgcgtatgttgcgtagtgtttataatcgtggagtggagtcggggagagctccgtatgtcccccgactgtttcatgatgtatataccggagtggacattcggcagaaacgcgcgttgccggttccggaattgcataagcttctgtatgaggatcccaagacggaccgtttgcgacgtacacaggccattgccggattgatgttccagttctgcgggatgtcctttgccgatctggcacatcttgagaagtctgccctggatcagaatattctccgttacagccgtatcaagacgaagactccgatgagtgtggaaatccttgatacggcgcaggagatgatcagccagctcctgaatcatcagccttcacgtccggattgtcccgactatctgttcgatatcctttcgggtgacaagaagcgtaaggatgaacgtgcttaccgtgaataccagtccgcccttcgccggttcaataaccatttgaagggattggcaaaagctttgcgtctgacttctccggtgacttcctatacgctccgccattcatgggcgactaccgccaaatatcgtggcgtccctattgaaatgatcagcgagtcgctgggacataagtccatcaagacaacccagatctatttgaagggattcggactgaaggaacgtacggaagtaaataagatgaatttatcttacgtgaagaactactcaatggaggcgttgtaaatatataaaatattaatagtcagtattaaactatgtgcattacttcttaggtaacggatttaaatatgacgcaaagatagacaaaaacacaaataggaaacaaataaaattccattttttttcgttttatccgcaaataaggcaaaaaagtctttgaacatgaaaaaacattatcttcatgtcccactgccgttataccatatttccacaggaatataccccttctcgcaggctgcaaactccttctatcacgtatttgtcgatgtttttcactgttcccattctgtttgtctttgaatgtataggtttccgttacctaagaagtaacggacaaaaatggggtaaaaaaagatgattctaacaaacaagaaatctattaatgctgggcctagctatgggacaggggaaggcgtagcacactcaaaacgctggtatgtcgccttggttcgtatgcatcacgagaagaaagtttcggagtatttagacaagatgggcattgaaaatttcatccctcttcaacaggagatgcatcaatggagtgaccgtcgtaaactgatcgaatccgtccttcttccaatgatggtctttgtacatgccgacccgaaagaacgggtggaagttctgagcctttctacagtgagccgttatatggtgatgcgtggtgaaagcaatcctgccgttattcctgatgagcagatggcccgtttccgtttcatgctcgactattccaaggaagccgtatgcatgagcagttctcctttagcccgtggcgagcaggtccgtgtgataaagggacctttgtcggggcttgtcggcgaactcgtcagtgttgacggtaagagtaagattgctgtccgtctgaatatgctaggatgcgcctgtgtggatatgcctgccgggtatgtggaatcaataaaagccgtagtttgacaagataattagatctgtataatggagttacaggataaaatctttcatcttcataatcaggcccatcgccttcttcatatcgaatgctccggcagttatttgtatgctgacgacctggctcagctgaataaggatattcataatgaaatgaatgagttatatcctctgcatggcagtactccggaacaggacgcttccttgtgtcttgctcttctgttgggctatagtgtgagtctgtatgccagtctggaggatgacttgaaaagggaacatattctttcccgttctctggaacttcttgaaactcttcctccctcacctttgaaagatgatttatatactgtttgcaaagagtatatgagtgtataaagtttaaaattaagatattggggaataatatttatgaaacagacattagaaggtgttttaaaatacctccggaagaattattgtagttattggattatattgggaattgatacagctatagctgttctttgtacatggatagcctacatcggtatctacagtatgacgggaatttctgtacgaacagatgtttttgcgaaaattataggaatttcttttatttccagtatactcggttcatacatatttcgtacttatcgcaataccatacgtttttcacaattaaaggaattgtggcgtctgatgggaagtgcatgtttaaaagccatttgtatggttattgctatttggattttcatacctcaaatgggcttgtccaacagtcagagaatgatctttgtattattcgatggtatgctgacctttattgcaatggctggatttcgtattcagctgatactgatctacgagtttcttcttaatcagatgaataagaaaaacgagcgtattctgatatatggtaaagatgataaaagtgtggcattgcaggtacgtctgatgaatagcagacatttcaaagttgttggtttttatgtttatgatacaagtgcttcgatccttcgtgtagcaggctttccggtttattcttttaagaatgaaggagatttcaaaagacagatgcacaagcattgcatccaaagtattttatttgcacgttatgaagatacccgagaagaggaagaccgtttacttcaattttgcaaaaaaaataaaatcagaacactgatagccccttctattagtgaggctgatgaacatggaaactttcatcaatgggtacgtcctattaagatagaagatttgctggggcgtccggaaatcagtatcaatatacaggaagttgcagcagaatttcgggataaaataattatggtaacgggggctgccgggagtattggtagtgagctgtgccgtcagttggcgcaaatgggcattcgcaaattaataatgttcgattcagccgaaactcctttgcataatgtacgtcttgaatttgaaaagaaatattcaaatctagactttgttcccatcattggagatgtccgtgtgaaagaacgtctccgtatggtgttcgaaacttatcagcctcagataatctttcatgccgctgcctataagcatgttccattaatggaggaaaacccttgtgaagctgtactggtcaatgttgtcggctctcgccaggttgctgatatggcagtggaatacggagcagaaaagatgatcatggtctctaccgataaggctgtaaatcctactaatgtaatgggatgctcgaaacgtctggcagaaatctatgtacaaagtctgggctgtgccatccgtgagggaaaagtaaaaggtcgtaccaaatttatcactacccgctttggtaacgttttgggtagtaacggttctgtaattccccgttttaaagaacagattgagaatggtggtcctgtcacagtgactcaccctgatatcattcgtttctttatgactattcccgaagcttgtcgtctggtaatggaagctgctacgatgagtgaaggtaatgagatttttgtttttgagatggggacggctgtgaagattgttgacctggctacccgtatgatcgaacttgccggttatcgtcctggtgaagatattgagattgagtttacgggattgcgtccgggtgagaagctttatgaagaagtattgagtgataaggagaatacaatccctacagaaaataagaagataatgatagcgaaggtacgtcattatgaatatactgatatccttgatacttatggagagttcgagaatttatcccgtacggtaaagatcatggatacagtgaagctaatgaagaaagtggtacctgagtttaaatccaagaactcaccgaagtttgaggtattggataataactgaaagattgtctaaaagggaagaataagttttcgagcgtgaggaacaatctattcccgcataaaaagaatctgaaatgttaatttgtaaaatataagtaatgtttggtcactgatatttataataatggaaaagcaattgagtactaacaaagtgcaaagaaaataaggaattcaaagtcatttaagatagttgtttcataaagattaatataatcgtatatagtcacatttatggcaaaaaaagtaatgctcgtttttggcactcgtccagaggctattaagatgtgcccactcgttaatgagctccaaaagcatatgaaggagttcgaaactatcgtttgtgttacaggtcagcatagagaaatgcttgatcaggtgctcaagctatttgaagttactcctgattacgacctgaacatcatgaagcaaggtcaggatttaactgatgtgaccgctcgcgtccttactggtatgcgtgacgtgttcaaggagtgtcgtcctgatgtagtgcttgtccatggtgatactaccacttctacagcagctgcccttgcagcattctatgcacagattcctgttggccacgtagaggctggccttcgtacccacaacatctatagtccttggccagaggaaatgaatcgccagatcaccggtcgtattgctacctataacttctcaccaacctcagtttcagagataaaccttcttgcagagaaagtccttggtcaaatcttcgtaactggtaatactgttattgatgccctccacatggtggttagcaaactgaagaacgacaaagtacttgcaaaggaacaggacaatgtacttgcagtagcaggttatgatgtaagtcgtctctcagatggtaagaagctcgtccttattaccggtcatcgtcgtgagaactttggtgatggtttcatccatatgtgtacagctataaaagaccttactcagaagtatcctgatgtagatttcgtttacccaatgcacctcaatcctaacgtgcgtaagccaatccatgaagtctttggcgagaatttggataactttgaaaatctgttcttcattgagccacttcagtatttggagttcgtttacctcatggaaaagtcaactattgttcttactgattcaggcggaattcaggaagaggctccaggacttggcaaaccggtacttgtaatgcgtaacactacagagcgtccagaagcgctcggctctggaaccgtccatttggtaggtactgattataaaaagattgtgaatgaagtaagtgcgcttcttgatgatgaagctacttatgagaagatgagtcatgcagttaacccttatggtgatggtaaggcttgtaaacgcattattgctgctctcaatggtgagaatcctactccttatggaaagtaaaaagaataataagtaaaatgtcaaaataagtcatggttaacgtaattggcctcggctacattggacttcctacagctctgatgatggcctcgcatggtgttgaagttgtcggcactgattataacaaagaactcgttgcaactcttaatgcaggtaagacgacctttaaggaggatggtcttgatgaacttttcaatgatgcagtaaaagctggcattaagtttaccactgaatatcagaagactgacatgtacatcgtcagtgtacctaccccttatgacaagttctcaaagaaggttgacgcatgctatgttgtagcagctatcaaggaagtgatgaagatatgtcctaagggagcaaccgttgttgttgagtcaacagttagccctggtactatggacaatttcgtacgtccagtagtcgaggagaatggctttaagattggtgaagacctccaccttgttcacgcacctgagcgcattattccaggtaatatggtttatgagcttctccacaataatcgtactattggtgctgattccaaggaaattggcgagaaggtaaagcagtactatgtatcgttctgtcagggggaaatcgttgttactgacatccgctctgcagagatgaccaaggttgttgagaataccttccgtgcagtcaacattgcctttgctaacgagcttgcacgcatctgtcgtcatgataatatggacatttacgagattattaagatttgtaatatgcacccacgtgttaatatccttcagccaggcccaggtgtaggtggtcactgtatttctgttgacccatggttccttgtaggtgattacccacgtcttgctaaggttatagatgagtcaatgaagacaaacgactcacagcctgagtttatccttaaccgtatccatgaaattatgaaggagaacaacatcgagaataaccgtaaggtaggtctttacggcctcacttacaaggagaatgtcgatgactatcgagagtcaccaactctccaaatgcttgaattacaagagcgtcatcttgcacgtccacttaagtgttatgacccattcctcgtaggaaacaagattgcagaaaatcagtacgatgacttcgatgagtttcttgttgatatagatatggttgttattatggttaagcatgatcacattaagggaaattggaataagctgaagggcaaggttattcttgactgcttcaatatctgtcctcttgaaggcgtttatcatatttaatattataaggataactggcaacgcaggtggaaccaatgttcgaagttcgatacttcttgccagtctgattttctttacttaagagttcaaaaaactatcagtgaactatcaatgaaagaaagatataattacatagattactctaaagcctttgcaattttactcgtgattacaggtcacatctgtttattttgtataaatagaggtaatgtgaataatgctgacaacatgagaatatatagttggcttacagttttccaaatgccattgttcttctttttaagtggaattgttatcaaacataaagactactcaataaaagaaacaattaaacatctatataaaaagacaagacaacttttagttccatttttcttgttcggtacaatttttacgttatttattcatcaaggtttttgtgaattcattactccagttatgaaacaaggctattggtatcttctggtattatttgagctctatcttatttattatttttttaatcccataagtttattgtgtaaaagcaaaatgttttcatttgttgtggatttgatattcattgttcttctatactccatgctccaattgttaaacaaaggagttgatttaaatagttcatgttggcagaactatctaagtttaatccaagtaaaaagatatgcaccattcttttttgtagcaatatttttaagaaaatacgatgcggttaatacgcttttcaataataaatatattatgttagcatcccttctaattgctgtcataacggagctcttgaaatgttttaattttaacatacatgcaattggttattggttaccatggatttatatagttctcagtatatctattattatgaaacttgaagttttagataataagatgacacaactgctgtcgtttattggtgcacatacacttgatgtatacgtacttcatttctttattgtaaggagtataagcatggcatttttgtgttcttatttcgataattataattatctgatcttagaattgttaattattagtcctatttctattctcatcgccgtcatatcggtatatattggcagggtaatcagagctaataaaagaattgagtccttcatctttttagataataatttgtgcctaataaagaatctatctcagtaggaaaatctgacattatttggagctatattgccaaatttttaggaatagcatctggtttattagtcctgccttttattttgaatcgattgacggcagaggaaatggggcttaattatttgatgcttactataggatccatggtgtcattgttggactttggcttttcacctcaattcggacgaaacattacatatgtatttagtggggctaaggagcttgcaaaggagggattttcaaagaaggaagttgatagcaaacctagttataggctggttgctactgttatcatcacggcaaagatggtatacaagcggctatcattattggtactcctaatcatgttaactgctggtacatggtatatccattatgttaccgatgggtttagtcaagtgcctaacactctcttgatatggattatctattccttatctgtatatttcaatatatatttcaattactatagcagtctgctcacaggtcgagggttaattaaggagaattccatttcaataatcctatcaaagttatcatatattatgattacgcttggtatgatatttatgaattgtggtcttctttccattgttgttgctaactttatttctccgttcattcaaagattctatgcatacaagatgttttatggcagaggattaaaaaagttactacctgttgatattaaaaaggatgaaatacagaaaacattctctactattgggtatagcgcaaagaaacttggtcttacgtttgttggtgcatacgttgtcaataaaatgaatatgtttattgttggcatctatctatccttggaagtaactgcgtcgtatggattgatggttcagcttggcaccacaatggtaacaatggcgtctgttttctttgtttcgtatcttccagtgttctcaaactaccaagtgacccgagaatatcagaagttgactgaacttctctcattcactatgatcatattttgggcgttaatgatttgtggttgtataggaatgttctttttcggaaactggttgcttgatttaataggttctcaaacgactctaccatcaagatggatttgcctactatattttctattctcaacccttgaattgaatcagtctaattttgcaacaattatagttacttccaatcgagttccttttgttaagcctacattgatttctggtgcagtaatttttgttggcacttttgttgtactcaaattgacaacgtggggtatactcggtgttgtgcttgttcaggctgttgttcagttatcatacaatgattggaaatggccaaaacaggtgtttgaagagcttaatgtgagtcttttgcaatttgttaaacttggaataatcaaatgcaatacattaataaaaagaacgaaatgagtaaaaaaattggaatattactcgtcgaatctcttcctcttcctcctgtcaaggggggggctgttgagaacttgacgcaactcattattgataataatgaggataggcatgatttggatatctatgtgttttcaaaatatgatggtgctgcggcagctgaggcaaagcaatatcataatacccaatataaatattgcaatccgtcaggaatctacgttctgatagatattttactcaaagttgtcagacgtatctgtaggaattatttgcatataaataccccttcactttatgagataaaggcatatcgctatttcaagcagcagggtatcaagacattgattcttgaaaactgtcctgcatacgctctatatcaaaatcgcaagtctgagtttgaacttattcagcatttgcataacgattatctcaatgcatcaagcaaaataaacgatctaatattccaacatacccaaaggatatttactgtgagtaactttattaagtctcgcttgcaacctattgtgccttcttctattccagtggatgtttgtcacaatggtatagacttgcaacggtttgagttgcctatagaaacacagaagaagcaagaactacagaaaaggtatggtatcagttctactgatagagtaattacattcactgggcgattagtaaataacaagggtgttaaagagcttatgcttgcttttgagaaggttgcagcaaaacataatgatgcgaaattactaatcgttggggggcagtcattctctaataatgttaaggatgattacgtcattgaccttgaatttatagcttctagaataggaaatggtgtcatttttactggatatgtagattactcagagattacttcttacctacaactctctaccattgttgtcgtaccatctacaagttttgaggctttctccctttctatactcgaagcaatggctgctggaatcccagttgtcgtgtccgatgctggtggaacgcttgaggtgattgacgaaagatcagggatagttgtgaatcgtggagaaggtttaattgatggtctatcaacggctattgaagacctgtgctttgatgacgaaaaactccacaaaatgtctgttgctgcaaagcgaagatcaaaagtcttctccgacaagactatgtataatagatttgtggatttattgaaatgaacctactttatatttacagttcaaatatcaatcctacgcatgggggggtacagagagtgacaaaagttctatgtgactacttccgcactctaggacataattgttactatctttcctctcaacctactaatggtggtattaagaaccaatatgtacttcccaatacagaactgctgaatgagcagaatatttactatatccaattattgttgaaggaacaaaaaatagatgtggttgtgaatcaggatggattgtacaagaatctgactaaacttgtgcatactagctgctacggtcatgccaagatatttacggtagctcataattctctccttgctcccgttactagttttactattgttcgttattctctatttaagaaatttcatctcgcatggctactccctttgcttagaacgtcagttgtcaagggagtgatgaatgctatgtataaaaagaaatacaaacagcattatcaagatattcttaagtattccaatcaatttgtactactttctaatgcatacaagaaagaacttgcatttttcctacccgatttccctcaagacaaggtatgtgctatctataatccttgtaccattgtatgcaaagatgatgagataatagaaaaaaagaagattgtactttatgttgggcgcatctcatttgctcaaaaacgtaatgatctcctactgcatgtgtggaaaaatattgagctacaacatgcagattggcaacttaaggtagttggcgaaggtgaagatcttccaagactcaaaattatggcaaaagaaatgagtcttacaaatatatcgttcgagggtttcaaatctccagagccatattacaaggaggcctctgtcttctgcttaacttctgcatatgagggctttggtctggtattggtggaggctatgagctatggtgtggtacctgttgctttcaatagctacggggcagcagaagatgtgattgataattgtgtgaatggatatcttgtaaagccattcgataagcaggggtatataaagatagttgaatacttaattggagataaattacggttgcttgaaatgtcaacccaatcggtactgaaagctaaagcttttagtgttgataatattgggaaccagtgggtaaaactgtatcaggagaagtaaaaatggatagattatataagttaaaatgttggatatatcccctttcctttttaggtgcagaaatgttctcggctttctgcggaattacaggttatagacaggaagaaggtagtgcgttgtacctttattatatgatatcattgtttgcactttcattgctattagttgtacatgatattttcatattgggtaaaccttttagcaagatggttttattaatcccaattatatttactgcatgttatttttctgatattagttctgaatcgcctcctttagaatggacaaaaaaggcttatcagttttttttattcttttcgctgtcaccaatgttaattgctagcttaattgcaaaaaacaatagtattgaaggtatgtataaatacttggatgttatcttgattattcttggtataggaatgatagcaagattgcctaagatgatgatgctaggagaattaatagaaggttataatggcatttcttaccagtcagcacttgcctttggagctatatattatggtttattgtcgaaacgagaagatagatttaaatttctaaaaaacaaagtctttaagttagtaagtatcgtaatgtgtgtgctgcttcctttaacatgtctttcttctggaggaagaggtggcgtagtctttctatttgcattagcggggctgattagtttaatctttgtcaagaaaagaaatatatttaaggtcctgttttttgtccttccgttgggtttactaggagttgtcattatatttgatcttgttcaaaattcagttcttgaaaatacttttaatagaggtatggatcgtgccttttcctatatttcttcaagcggtattgatatggcacaaacatctaatcgtgatattgtatttgaattagcacaaaagaatattgaggcaaatcgatatactggttatggaatctttcatactattggtgcatttggatatcctcataatatctttttagaaattctggaaggcggtggaattttctattttgcattttggataataatactaattataagtataaaaagagcatattttataataaaaatagaacgaaatcttttgttcctagtacccttgtttatatatccgtttgtaaatcttttattctcaggatcatatcttatgactggtatgttttggtttgttcttgtattcgttttaatctataaaccgcaacaatattgaataatggcaaaagtattaatccttcaaaacgaaatatctgcgtataatgtatcaacctacaattgtatttcagaacttcacgaactgacggttgcatattactcaaaagataaatcgtcaattccatgtagttttcaaaaacataaactaaattacataaagatcaagtctataattttagttagtgacttaaaatctctttgtaaacaatttgatgttgtcatatttgtaccagatttccatgtaccagcttattgtttattgccatttggtaatagacgatataaagtaatctcatggagtattggtttccgagtgtcttatgtccatccgtacattacctacagaaaacacaatttgttggataggtttttccaaaaagtgttatcagtatgtgatgctaatatcttctatataaataagtcacgagaattttggaagaacactaatttacggatggacaatatatttgaagcaatcaatactaccgatgtagagaaaatagaattcaaccctgagctaaagaaagactttctttttatagggacgctttataaaggaaaagggctcgatttgctgcttgaggcttacaataagttctacaaacagagttcatgcaatacaaaattgcgaattgttggtgcaggttctgaacgagaagtgttggaacaatatgttaaagataatggacttcaagacaatgttgcttttcatggagcaatctatgatgagaaggaaattttgaagatcttccaacagtcattgctgtgcttttctccgacacaagccggtttgtctgttccaaaaagtatgggttatggcgttccgttcgtctcacgcaaggatgctattactggtggagaaatctatcatatacagaatggcgtaaatggtataatgtatgagaaggacgaagatctctcggcaattatgttagatgcttttgaaaatcgtattaaatatatcgatatgggacgcagggcaatggattattattatagtaaagcgactaatgagattaaagctgaaggagtgatagatgcaattaactatgtaattagctaatcacaatgatgaagaatatagcgattattaataatgtagattttggtagcactggacagatatcactaaatctccatcggaatttattagctaagggatatcgatcatatttttgctatggtcgtggtgcatctccaactaattcgtctatgaaaaaaataggtagtttcttatctgttaatattcatgctttgatggttcgcatgacaggacgacagggattttattctagttcttcaacaaccaaacttttacgattcttctcaaaagccaatattgacacaatatacatagtttgtattcatggatactatttgaatgagtataaattgtataaatatgtggcagataataatattgctttagttcacataatgatagacgaatatgcttatggtggcaagtgtgcatataataatggttgcaatcgttatttttgggggtgcggtaactgcccaaataaggcttcatatccaactagtctcattttggatggatcaaaagcagtgtttaaaatgaaacaaaaagcgtaccaaatgttatcaaaagctgcttttgtcggtccacgttttgttgtcgaaaaagcgaaagagtctcccttgctgcaaaatgctaaaattgtggaattagatgaatctattgatatggatatatactatcctagaaatacagataatctgtatagtgaacttggaataagtgataataaaatcgttatcacctgtattgcgccatttaataatacagtgaatgaccgtaaaggatgtcgattctttatcgaactagcaagaagatttgaaagcaataataactacatatttattcatgtaggatatatgtgtgaggataaatcatttttgccaaagaattatattccaattggatttattcgtgaccaaaataaactggcagagtatttttctatcggagatttatttgttttcccaagtttattagatacaatgccaaatgcttgtttagactcattggcatgtggtgttcccttattatgttttgatatatctggaatgccttatgtttcagataatactgtcggcacctttgtggaggcacgtaatgtgacggaattacaaaaggttgtacagaaaactgtaaagaagaatagcgacattattcaaaggtgcagaagttatgcattgtcgagatatgattcaaaaaaatacaatgagagattgatgcaaattggtgaatatttaaataaaatataattatgattccatttaataaaccctattgttctggtcgtgaactgaaatatatggaggaagtttgtcattctacaacaatgtcaggtaatggtgattttacaaagaagtgtcatactttttttgaggagaagtatggcttcaagaagtgtctgttgactacatcaggtaccgatgcacttgaaatgtgcgcaatgctttgtaatctccagccaggtgatgaggtaattatcccttcatacactttcgtatctaccgctcttgcatttcttcgtgaggatacgaaggtgatctttgcagattcaagtaaagagactcctaatatggaggtcgcacagattgaaccattgattacagaaaaaactaaggtcattgcagtggtacattatgcaggtgttgcatgcgatatggatgttattatggcattggctgagaagtataaccttcttgtagttgaggatgcagcacattgtgtagatagcttctacaaggataagccccttggtggtatcggtcatcttggggcattctcttttcacgagacaaaaaatatcagtagtggagaaggtggtatgcttgtagtgaatgatgatcgtttcattcgtcgtgcagaaattctttgggagaagggaaccaatcgtgcagagttctatcgtggtatggtcaacaaatacggatgggtggacatgggttccagttttcttccttctgagttcaatgctgcatttctatgggcacagttggagcaattggatgacattcaggataagcgcaagcatatttgggaaatgtactacaatggcttgaacggtaaggttggtgatatggttcgtcttccatttattcctgagtatgctacaaacaacggacacatgttctatctcctttgcccatcactggagtatcgtatagctctgatgacataccttaaggagaatgatgtacagacaacattccattatttgcctcttcatagcagtaagtactatgcagacaagtattatggtgctgaattgccaaattgtgactattatagcgattgccttgttcgtctgcctctgtattatgagttgacagacttggaggttaagaagataattaaacacattattgagttctgctcaaagaactaaaaagcacatccttacctgaagacaataagtatagcgagattcgaattctcggtgaggaaccaataatcgtaacaatattatgaaaggtatagttttagcgggaggctcaggaacgcgcctttacccaattactaaaggcatctctaagcaactcatgcctatttacgataagccgatggtatattacccaatttcggtattgatgctggcaggtattcgtgacatactgatagtatcaacaccatttgaccttccgggattcaaacgactcttgggagatggctctgattacggtgttcattttgagtatgctgaacaaccatcgcctgatggccttgcacaggcttttaccattggtaaggactttataggtgatgattctgtttgtcttgttttaggcgacaacgtattctttggtagtggttttacggatatgctgaaagatgcagttcgtactgctgacgaagaacacaaagctactgtctttggctattgggtaaacgatccaaaacgttatggagtagctgaattcgatcgtaatggtaattgtctatcaatcgaagagaagccagtaaagcccaagagcaactatgcagttgtgggattgtatttctatccaaacaaaattgttgatgtagcatcaaagatacagccgtcagcacgaggagaatatgagataactacagttaaccagtggttcttgaatgacagggaattgaaagttcagattcttggtcgtggatttgcatggctggatacaggtacacatgattctctttctgaagcatcgacctacattgaggttgttgagaaacgtcaaggattgaaaatcgcatgtctcgaagcaatcgcctaccgtaaaggttggattagtgaagagcgcatgcgtgaacttgcacaaccaatgattaagaatcaatacggtcagtatcttttcaaggttattgacgaaatgaagcaagacattaattcaactaatatacttgataaagtggggaaataagatgaaaaaatatagtaatcactggtagtgtcggtttcataagctcactcgttgtacatttgtttgtgaacaaatccctaaagttataacatcatcaattaggataaatttacgcatgtaggtagctgggctaatctgaaagaaatagaagacaagcctaactataagtttgtgaagatggatatttgcgacttcaatgcattcctaaataatgaggcttggatggatagcattacaagtggtgaatataagagatattataatgtaatatgtggtgaaagatcgtaatggaaatgcttttaaggacaatattcttatttttaaactacttgaaatatcgtttaaaatataaggataatatttggtttcgtggatttgctgtgatttatgcagagaagggttcatcaataacatttagtaaggtaggtcgctctaacatattctcacacccatttagcaatatgattggtctttcgcaaagatgtatcattgttgcaagaatgggtggtaagataaatataggatctcatgtctgtatgagtggatgcacactctactccatagattcaataactgtaggtgaccatactgatattggtagtgggtgtaagattatcgataatgatttccatcctctatcatatagtcagcgttctccagttgaacgtttagatttagtcaaacatcgtcctattaccatcggtgaggggtgcttcattggggcaaactcaatcattctgaaaggtactactctcggtaagaatgtggtggtaggagctggcagtgtggtgtgtggatcatttcctaataacgtaataattgctggtaatcctgcaagaataataaaggagaatgagcaataagtaatgatttttacttagtgaaatgatagcattgctttggcttcatttaataaaatctaagatttaatgggcgttaattatctcaagtgtgcatacatccaagaataaaggagatttaaataactagcgtagaaattggacgtttaccgaagtatgctacaacattcttgaggatattattgctatatggtgagcacttattttatcattatgaaaaaacttttaatgcttggaggtggtttccttcaaaattttgttattaaaaaagcacgtgaaatgggctattatgttttttgcttagatgcggacccaaatgcattgggctttttgtcagcaaatgaacatgcagttatcaatattgtggatgaagaagcatgtcttgcatatgctcgtggaaaaaatgtagatggcgtgcttacagcggcgactgattatggtgtacttactatgagctatattgctcaagaactagaactgccaggaattaattatgaagcagctaaaagaataaggaataaagcagctgttagaaaatgcctttttgatgcaaaagctgatgatacaggatattcttatgagatacataatgtagaggaagctgaaaagtataagaatggtattaaatatcctgttatggtcaaaccgtgtgatggttctggtagtagaggggcgtcaagagttgataggggtgaggatttgattgaggcttgtgaacttgctataaatagttctataacccatagagcagtggctgaaccatttattgtaggtcgtgaatatggtgtagagtcatttgtagataatgggaaaatttatgtattggcagtaatgcagaaagatatgacattacctccatattatgcagagctgggacacgctataccttctggtctttccttatccttagagaataaggtaaaaggatgcgtaaagaatgctcttatagctcttggagttaatcatggctctgtaaatatggatttgttgataaacagtaatggtcaagtacatattgtggatattggtgctcgcatgggaggaaatctgattggttctcatataataccgacaggtacaggtattgattacatgggcaatatgattaaagctgctgttggtgatgaaactaactggactccagccacatctccgcagccagtcgctacgaaacttcttgctctaaaaccagggatagttaaagttctccctgattttgttaaaatcgagactgaatttaatgtaatagtggaacatcatcttcatgttggagactctatcacaccatatagaactaatcttgatggttgtggttatgttgtagcgaaagcatccacaatagaacattctatagaacttgcagcaaaagtaagacaaatgctcgatataactatattaagaaaataattatgtataagcactttttaaaaagattattagatattgtattttcattattggtctttccgctttttggcttaatattaattcctgttgcaatcgcaattaagttagatgatggtggtccggtattttataaatcagcaagagttggcaaggggtttcaaaaatttaatatgctcaaattccgttcaatgaaagtaaatgctcctgatttacgtaatgttgatggtggcacatataactctgctaatgattcgcgagttactaaaataggaaagtttttaagagaaactagtcttgatgagattcctcaaatattgaatatcataaaaggtgatatgagtattattggacctcgtgcgggcgattgggagagtgttgacacttatgaagatgatgagaaagacaaggcaaaagttgtacctgggttgactggttattgtcaagcatattttaggaataatgcatctgtaagagaaaaacgattaaaagatgcttggtatgcgaataatgtaagtttcgtattggatgtgaagattttttttaaaaccattgaaactgtattgaaacacgagaacctttatactaactgataaaatggatagatttatcatagtagacagtcacaattctgaatatataggtataatatttcacattttacgtaaatgtggctacaacatggctttaacaaaaagattatttcattggattccttcttattcaaaacggaatatcagaagagactgccaaactaagactgtagtcttagtttggaatgaggaattaaatgattatacaagtacatttcaaatgtacaaaaatagtgatagtagtctttatataagaaagattgccaccttacctcaatatgaaggaaaaggaattgggaaaaggaatcttttgtatatagaacaatttgcaataaaaaatggatgttccagaatatgtttggatgtttatattaaaagtaagggagcaatatctttctattcacatttgggctttaaagaggtaggaaccaaacgttcaattaggtttaaggaacttataatgaaaaaacaattagattaatgtcattatgaaaatcttggtgttacctgcatattattatccggagcaagctgcaagtccttatttaggagacaatattcgtgaagctatgtgtaatgctggcttcatattagatctgtatgctccaatgccaacgcgaggagtatctgaagaaatacgtgttgagtataaagagcgtaaaatagagtacaaatacgataataaattagtgattcatcgttttcctatgtatagtgaaggaaaaaatcccattaatcgtgctttgcgatatgggatttgctggtgtgtacaatttgggaaaggattgtgtgccaaggatattgatttaatttatctagcaagtacacctcctattcaaggtgcattgggctgtttgctgaaaaaaatcaaaagagttccttttgtgtataatcttcaggatatctttcctgattctcttgcaggtaccggcttggtacgtaaggatggattgatatggaggatagggcgtgtggtagagaactttacttataagcatgcggacaagataattgttatttcggaaggtttcaagagaaatatcatggctaaaggtgtacctgaagagaaaattgtagttgtctacaattgggtggatcagaatgcagtgaagaatgttgcccgaaaggataataagttgtttgataagtatcatttggatagaaataagttttatatcacttatagtggaaatataggtctgacccagaatatggatttgctgctcgatgtggctagaagtttggaagacaatgaggaaatccagtttgtattgattggagagggggcttataaggagcaagtcaaggaagttattactcgtaataatatcaagaatgttactcttttaccttttcaaccatatgaagatattagccatgtgtttagccttggagatgtgggtattattatctctaaaccgggtgtgggtgaaaactcagtgccaagcaagacttggagcataatgtcagcatcgagaccggtactggcgaactttgatgagaatgagattaagactattcttagtgagaacgaatgtggtgtgtttacgaaagccggtgacaagcaggcatttacagatgcaattcttgagctttgccggaatagggagatgtgccggaaatatggtgagaatggtcgaaagtttgtaatggaaaatctgacaagggagattggcacgcaaaaatatatagacgttataaagagtgtggcgaaaggttagtttggctaagcagaaatgctgataaataaaagtgaatagttttataaaagtataattcaactatgaatatgaagttaaggaatattccgttttctccccctgatatgagcgatgcggaaatcgagatggtagcggaagcactgcgttccggttggatcactacaggtccgaagacaaaggaatttgaacagctgattgctatgtgttgtggtacggagaaggcggtatgtttgaactcggctacggcttgtatggaatcaatcttgagagccttgggtgtaggaccgggtgatgaggtgattaccagtgcatatacatataccgcaacggcaagtattacttgccacgttggtgcaaaggtggtgatggtggatacgaagcctgggtcgtttgaaatggattacgacaagatggctgatgctatcactgagcgtacaaaagtggttattcccgttgatctggccggtatcgtgtgtgactatgataagatatttgaggtggtggagagtaagaaatatctctttaagccagctaatgatattcagaatgcatatggcagagtgattgtgatggctgatgccgctcatgcatttggagcaagacgtaatggaaagatgtgtggcgcgattgctgactttacatcattctcattccatgcggtgaaaaacctgactacggctgaaggtggtgcgttgacttgggtgaaccgtgaggggttggacaacaatacactgtataagcagtttcaactgttaagtctgcatggacagaacaaagatgcactggctaagacgcagctgggtgcatgggaatatgatatcattgctcctttttataaatgtaacatgacggatgtgatgtcaggtatcggactggcgcaactaaagcgttatccggagatgttacgtcgcagacgtgagataataggtctgtataatgagggagtgaagggtacttgtattattccgttgaatcattatcctgataatgatgagggaacgtcttcgagtggtcacctgtatatctgccgattggagggtaaaactattgaggaacgtaatgcgattatcatcaaaatggcagagcggggcattgcttgcaatgtacactataagccgttgccgatgatgacagcgtataaagcactgggatttgatattaaagattatcctaatgcatatgagatgtatcataatgagataacgttaccgctacatactagacttacagataatgatgtggcgtatgtaattgaaaattttgtagatattgtaaagagtcactaataagagtctgttcgaaaggaagattatatattgtaaataagataaaagttttgattaatgagtaaaataaaaaaggtagccttaatatcaggaatcaccggtcaggatggttcatttttagccgagtttctaatagaaaaaggatatgaagtccatggtatccttcgtcgttcttcttctttcaacaccgcacgcatcgaacacctttacttggatgagtgggtacgtgacatgaaaaaggatcgtctggtcaatcttcattatggggatatgacagattccagttctttgatccgtattatccagcaggtacaaccggatgaaatttataacctggctgcacaaagtcatgtgaaagtatcttttgacgtacctgaatatacagccgaagcggatgccatcggtacacttcgtatgctggaggctgtccgtattcttggaatggaaaagaagacaaggatatatcaggcttcgacttccgaactattcggtttggtacaggaagttccacagaaggaaactactccattctatccccgttccccgtatggagtggccaaacaatacggtttctggattaccaagaactatcgtgagagctacggtatgtatgctgtaaacggaatcctgtttaatcatgaaagtgagcggagaggagagacttttgtgacccgtaagattacgttagccgctgcccgtattgcacaagggcttcaggacaaactttatttgggaaacctgaactcacttcgtgactggggatacgccaaggactatgttgagtgtatgtggctgattcttcagcatgatactcctgaagattttgtaattgccacaggcgaataccatactgtacgtgaatttacgatactggctttcaaagaagtcggtattgaacttcgttgggacggtgaaggcgtggatgagaaaggcattgatgtatcgaccggaaaagtcttggttgaagtcgatcctaaatatttccgtcctgccgaagtcgagcagttactgggtgatcctaccaaggcccgtacgttacttggctggaatcctaccaagacttctttccctgaattggtgaaaattatggtatcgcatgatatgaagtttgtgaagaagcttcacatgaaagaactgatgaatagagaagaataagaatggataaagatacgaaaatctatgtagcgggacaccatggtttggtgggatctgctatctggagtaatttgcagagtcgtggttacacgaatcttgtaggacgttcccataaagagctggatcttcttgatggtgcagccgtaaaacaattctttgatgaagaacagcctgatgcagttgtccttgctgctgcgcatgttggtggtatccttgcaaacttgcagtatcgtgccgattttatctatcagaatcttcagattcagcagaatgtaatcggtgagagttttcgtcataacgtaaagaaactactttttctgggtagtacctgtatctatccccgtgatgccgcacaaccgatgaaggaggacgctttgctgacttctcctttggaatatacgaacgaaccttatgccattgccaagattgcgggtttaaagatgtgtgaaagcttcaatcttcagtatggcacgaattatattgccgtgatgcctaccaacctttatggtccgaatgataatttccatttggaaaacagtcatgttctacctgccatgattcgcaagattcatttggctaaatgtctgaatgaaggaaattggaagtcagttcgtaaagatattgacttgcgtcctgtggaaggtgtgactggtagtaattctgatgctgaaatattggataaattggcaaaatttggtattactcctgaatcggtaactctttggggtaccggtacacctatgcgtgagtttttgtggagcgaagagatggctgatgcgagtgttcatgtattattgaacgttgatttcaagaatacctatacggaaggtagtagagacattcgtaactgtcatatcaatgttggtacaggtaaggaagtcagtatccgtgaagttgccggaatgatcatgaaagaagttcaatttaagggtgatttgcgttgggatagttctaagcctgatggtacgatgcgcaagttgacagatgtgtcgaagttacacagtttaggctggcatcataaggttgagattgatgaaggaattgagcgtctttatgaatggtatttgaaaggtgtctaaattttataatttatatattatggaaaaattgaatggaaagaatatcttaatattgttgttgactttgctttttacagcttgccagtcttataaaaaagtaccttacttacaggatgcagaagtggtactgtatagtactcaggatgcacaattgtatgatgcaaagatcatgcccaaagatttgttgactattgtagtgtcatgtaccagtcccgagttagctgctccttttaacctgacggtagctacacaaggtaatatggctttgaactataccaccactcagcccgctctacagcaatacttagtggataatgagggaaatattaactttccggtattgggtgaacttcatgtaggcggattgacgaagaaggcgaccgaacaaatgattgtggaaaagttgaag

SEQ ID NO: 251 - DNA, 387073 bp, Bacteroides thetaiotaomicron
  source 1..387073: mol_type = genomic DNA
agcgcaacgggggacgctgttagctttgattcgtgagttacgaaagaggtttccaaaagcattggtcgtaggacatcatgatttaaatcctcataaggaatgcccctgttacccttgtgtagaagagtacagagaattgtaggttagtaaaatcaatcgcaactatcaagttctgtaatgatttgtcccgaccaaaaactgtcgggacaaatcttttattattatatcatctcatcttttgtattcaacatttttatactttttcaatccgccaatctcccattgtacaactctcaccattctcaccatcaaagttgaccactaccttcactatcggcaatccacacaaaacataatttcccgaaacgatgcggacgactcaaaatcctccatatcaattatctttttcgcaaaacaacgaaaaaatatcagatttacactaggcagttatctttttccttctcacattactccaccacaggtttagtcctatccatacgacaatatctcctatcaacatcaacgtattatcaacataaggcatcagtaaaatatttattccactaaaaacgcaagaaactaaaagtatcaaaagcatagcctgacggactgtaaaacccattgccaaaaattgatgatgaatatggtttttgtccggttcaaatgggcttttaccattataaatacgaactataacaacacgaaccacatcaaatgcagggacaataagagtactaaaggctataacaaaagccccttgtgtaacaggaatagattctgtattctgactatattttattgctaaaaagctcaagatatatcctaaagtcaagctcccggtatcccccataaagatctttcgggcatgttccgcactaccaaaaacattgtaataaaagaagggtacaagcactccaaaggtactaaaagcaagcatactatagatccacaatcctttttctataaatagaaatccgaagactaacaatgcgacgctacttaacccggaggcaagaccatcaatcccatcaatcaaatttattgcatttgttatgaagacaatagtcagtatagtcaaaggaattccaatgtatggagaaataaagtcaatgccaaacaaaccatataaatcattaatccaaagtcccactgcagggaataagctagcacaaagaatttgaacaataaatttctgacgatagcgcacacctaccaaatcatctgcaataccagttaaatataaaagcaccatgccacatattaataccaagaattccggcaaaatataggacgccagcaaagtagagatttcatatcctgtcaaagttcgaatcacaaggactgcacaacaggaaagcaagatcgtcggaaaaaaagagaccccgccaagacgtggtattgctcgtttatgcactttcctttcatccggcatatcaaacagttttttgcgaaatgatattagtaagatccgaggaataataagacgagcaatatacgcagaaatagcaaaggctattaggataaatacaatattcataattatttgaatccaaatattaaagttcgattttaagccaaaacataaatgcacacatttgatataatatctaaaatcaatatgattaaatacttgatacactccaattcatccacaaattagaattgtatctccaactatctttaagcgcctccgataatactttattcgagaaaaccatcaagatagaatctggttcatccgcctttattccattagcgtacccctcaggaattagcaaaatcttactatcactagcagataaatgaaaaacttccggtactaaatcaatagcaggagactcccaattatcaatcttcacaaaagctgtagtaaatgaacctttaattgcataaaaccattttttctcatactgatgtgcatgccaagctctaatgatagatgtatcattttgatgaatgatatagaagcgttctatttcactcatatccaaactattcacatggaatatttctcctctataatctaccgagatgcctccctgaatttcttttatctcagacatattctaagacctccaaaatattaagtttattttttcaataatcatttccctattaaatacagaatctaataatcgtagtgcattttcagaaatacgttgcatttgctcatcagataagcttaaaaagttctcaaaccccaaagcaatctcgtctatatctgaagggtgagcaataattccaagaccataatcctcaaccagttgttttacctcacccttgaatattgcataaattggtttatgagtagtaagatacgcttgaaatttagatggaatcataatctcataaagaggcgtgtcctttagtgacataaccaatacatcactcgcttcataataattcggcatttccgcaagaggtttacgccccataaaatttacattgcagatattctctctactgaccaattcttttaattctgccaaataagaaccatcaccaataatatttaaataagcttcagaatagcccttcttagcaaacttggaaaaccccagtacgatattatccaagttttgtaccttcccaatattcccggcaaaagtgaaattaaattttcccggcaaacgttgtttttgaacgggagaatatttcatcaatgaccaattgggaataaaggtaatatccttttcaggaacatatcggcgaagacgatcaataaacccttcgcacgaaactaaaatattgtcacagtttttatatatccatttcacaaaatgctctaaacagaaactcaggaaacgagtcttcttaaatccataagcataaacggtttcaggccacagatcctgagtccaaatagtgacctgagctttatagagtttctttaatataatccctgcagtcgctaatgttaatggtcctgtttgataaataaagactctgtcaaatcgccgtcctataaataatacaatccaaaagctccaaaagacaaaggaaaagtaatttaagatttttatcagagtactcttctcatatccctgcacaacaggaaaacggtacactttgatcgtattataataagtagtctgatatatacggttcttatatccctcatacactttaccaaatggataagaaggagctctcgtcaaaacagcaaactcatacttatctttttcccattcttgcactaaatcattgatcaggaaatcttcaggatagaaggcttcaccgatgattaatgctttctttttctttgtcataaaatgcccggatattgataatacaaatgactatgacttttcatccattcatactgttctaataacatctcttcgtattcaggaacctcataaagaaacttttccgactttgctattgacttatctacaccattgccatcaaaaggaagtatttcaatatcattgcgaagccaaattttcttgaacaagtttaataaatcatatttagtgatccctttaccattgctcaactgtataagcccggtcttttgttgcacaatggcgacatccatagctttagccaattcaagagtagtaactccaccccaaattgcggttgtaaagccattcacttttcctttttgatgcataaaccaatggaatagaccttcaccattaagttttagttccggaccgataattgatgtgcggatagtcaaatctttatcatttataatctcgcccaaagccttactacgtccataaatgtcatcggcatcccggaaatcactttcattataattcccttttttaccggaaaatacgcaatctgtactaacatgtatcaacttggctcccacttcatctgcaagtttcttcaacaaatgtggaaaataagcattgataaaaatagcattatccggatgatctttagatccctttatcaacactccaatacaatttattatcaaatcagaacgtgtctcccgaacaaggttggctacagcatctttatcggttacatctaccacaatactatcgtctgtcagtttcgtacgatacacagcattcacaacttcatatcgccctgtattctgaagataataataaacaatgtgtccagccatgcctgtagcaccgaatatcaaaactttattttttgtcataagggatgaaatcaaacgtctttgtgccaaacggtacgattgacataatcggtataagaaagaattatgcgaacaacttttttagaaacattgtctgcggcatagtctgggatagaatgaataacgtttgtgccttccgcatactgagaagtcacaatatcgatagagtccaatatccgctcactgtttaaacctgtcattataagcgttccttcatccataccttcagggcgttcgtgcgcttgacgaatggtaatagctgggaaatggagtattgaagcttcttcagtgatggttccgctatctgaaataacacaaaaagcattttgttgcagcttgatatactccataaagccaaagggtttcatgaactctatcatcggctttgagtttacaaagccaattgattcgagctttttacgggtgcgcggatgagtcgaaactattacttttttatgatatttgtctacaatggcattcaaagaagaaagtaaatctgcgaagttcttatctgaatcgacattctcttcacgatgggtactgacaataaagtattctccttttttcaggttttctttctctagaacattattgttttcgatttctaccttatgatataataaaacctccgtcatgggagaacctgtttttattactgtttccggccgtaacccttcagccactaaatacctgcgggcatgttcggaaagaggcatattgatatcactaagatgatctacaatctttcggttaatttcctcaggcactcgctggtcgaaacatcgattaccggcttccatgtgaaaaataggaatcttcttgcgtttggcagaaattactgatatacaactgttagtatctccataaagcaaaagagcatccggctttacttcttccatcagctcatccgacttctgaataacgttggcgatggtttccgcagcattcttaccggcaacgttcaaaaaataatcaggtttacgaatatgaagttcttggaaaaagatttcattcagttcataatcgtagttttgtccggtatgaacaatgatatgttctgtatatctgtccagttcagccattaccctgctcagctttattatttctgggcgagtgcctactattgtcattactttaagcataatcaagaatttattagttattcgcttcttatttcacgtgctttcgctcttgcctccagtcccatatcttcacgtacgaaacgtagttttaaaagcaattctttcattccttccacgtccaaacgacgagtgttatgactatgataatcttctatcttagagatttcttcatttcctttcgtgaaatatttgtcataatttaaatcacgggtatcgcaaggaatacgataataatcacccatgtcaatagcacgtaccatttcttcacgagtaactaatgtttcatatagcttctctccgtgacgggtaccgattactttcacttctgtatcaaagtatttaggttctactttagcataagtttctttcaaagcttgcgccaatgtggataaagtagcagcaggtgctttttgaacgaacaaatctccattatgtgcgtgtgtaaaggcatatattaccaaatcgacagcatcatccaaggtcatcatgaaacgagtcatatcggggtcggttattgtaattggtttgccgtccatcatctgttccacccacaatggtataactgaaccacgacttgccatgacattgccataacgtgtacagcagatcgtcgtttttgctccttcacccaattcacgtcctttggctacagcaactttttccatcaatgctttactcattcccattgcattgattggataagccgctttatctgttgatagcacaacaacactttgaactccatgttcaatagcagaattaagcacgttttctgttccaacaatattagttcgaactgcttctacagggaaaaattcacatgaagggacttgctttaatgcagctgcactgaatacatagtctaccccgttcatggctacatcaacagaagatttatcacgaacattacctatgtaatactttattttagaattttgtaatgcatgacgcatatcatcctgttttttctcatctcttgagaaaatacgtatttctttgatatcggaatctagaaaacgacgcagtacagcattaccgaaagaacctgttccaccggtaatcagtagggttttgtctttaaacacggacataactatatttatttaattgtaaatacaacaaaagggatattcaataacacatatttatgctgagaactcattaactcaaatttcatacaaaaagattctgataatattttaaatgattttctgccattctttgtgctgtaaacatatcagatgctttgttataagcacgttcacctaatttaagtttattctcataagccaaaataatggatcgttttaaagaatcaatgttatccaactcaaagaaacatgcttcatcattattgaatatctcatgaaatgaaggtagttcagaacatacaattgattttttagctagagcagcctctaccattgataatccaaatccttctgaataggaaggcataacatagacatcaatattagctaaataattatatggttttttttgataaggaataaaatatacccgatcagaaatacctgtttgctttgataacaataataaccttgcaatatctggtccatctcctatgatcataaaagcataatcaggtaattcaattagtgcttttagaatctgttctaaaccttttctacgtgttacaaaagcataagtacccagtaatttatatttttctttgacctccatttgtttactaataatactagcatctaaattagaatcttcatttataatacatccgttataaatagttgtcaatttagaatgtatataactttggtaaccatccttcaactgattagaaatacttataacaccatcaaacttagattgcaaatgacaccaatatctagtaaataaataggctaaagctatattatattgatattggaaagagcgaaaagtatcctgatgcaaggttgttattatcttagcattcttaatcttttttctccatttaattacatatttatctggtcgcaagcaatgactatgtataatatcatacttatcgaaatcaatagcttgattcattcttattttataaactggacaatcaaaatccatagctggagttgcatcaaaatagtaaacatcaatttgctcaacatatgatttcaagtattttactacattgtttacaaccactattggacctttatttataagagaaggaagaataaatgcaattttcatctcatcagttttttaataggaagaaagaatattcagtatgataaaaccatatatatatatatcgaattgaatatatcaatagataaccagagaataggaacaataacattctttgctctttcacatctttattttccctacaataaaaagatattaagaaaaaatacgagaaaataaaatattggcacatcctagttagaaatccaaaattcatagtaattactaacaacagtataaatatgtaaaacatattatggtaaaatttaccaaccaatgattgacataatatcctcttatatttttttacaatatacaaaaaaggcagtgcttctataaaggttatcatatttaatcccctaaatccattctcagcatcaccttccaataaatatttagacaatttctccccaatcccaccagaaacacccattaatgacaatacatgatcaacaatagttaatataaaataatcagtaattctagtaacatttaagattccgaatataataataaaagtcactatccttttagtatttaaatcacgaaccataaaaaatgacagcaaagcaataatagcggtaaaatgaaaagttgctgccacaaatacaactaaaataaattttattttttcacccttaagtagtaaaggaaaagcccacatccatattatagacattgcaattgcttgtctcaaaagaataaaattatattgtaaatataatctcgaagccaaaaagaaaaaaagaaaaaaaagggctgtatttatttcattccgcttcaagcttttataaaataaaataattaatataaaattggtaagcaataagtacaaattaaaattatcacctaaaagcaagtgacataaggatgaatagaatacatatccaatttcttgtgattgaatttctaaatcagaagaagcatactctgataaaaaatcaaaaatacttaacggagaattatagatatttttataagttccataatcaaatatagctatatcatatcccacttcataagaactccatctacaaccagcaaatacaacaagtacgcataaagaaaaaagaagtaattgtttttttatattatcatttacttttatagaaaaggtatccatgaatgacaatacaaagaaaaacaatataaatatcataaatggaatgatattactaatcatactctacacattaattataccgcaaaagcaaattacgaaataaccgatttaattttcttgctgtctctataattaaatatctcaagcgaaaagggcaagcaaccattttcaaaactaaccattctcttaaactcaaatttatagttttagcatattcttttatctccataaaaaaaggatcttccttggataatcccggatcattgtcatttaaaacttctaacaacatatgaatacgagcataaaaaagacttttcttacatgtttcctctaaaccatgtgagttaattggctgcaaaagaaatttattcatttgttttgcatattcccaagtattctgaaaagtatgcatacaactatttccatgttgcacataattatacacatgtttgtcaatagctctcactttgcgtactttgactgccagtcggacattcattatataatcctcaccataaggtattgactttggtaaatccaatacagaagaatcaaacaagtctctacaataaagcttcccacatacagacaaaggagtcttcccttccaacaaagcttttaaaaaatctatattattccaatcacccaaagagctttgcccacatatttcacgaattttttttccctgttcgtctaccatgtaaaattgacttcctataacgatatctacccctgctgagctattattatacaaatcccataaagcatttttaggtaacatatcatcaccatctacaaaacaaagccaattgccccttgcggcctctactcctcttcgtcttgcagcagtaacaccagcattaacctgatgaattacacgaatacgatcatccttcaatgcatattcatcgcaaatattcgcactctcatcttggctaccatcatcaatcaacaataattcaaaatctgcaaaagactgcactattatataatcaatacattttctcaaaaaaggagcgacattataaacagggacaataacacttaccagtatatccataaataaaacttagtttataaatccaatgattctataagaaatcttttcgccttctccctctctatgttccaaatccgattcactttctcaaaattcactgaatcatgtaatttttgctctgttacatcttccaacgaatgtacccaacgttcttccaactcaaatttcttcagcaaagaagtaaaacgagccataccccgctctctattcgccatcacaacaaaaggcttattgaaaattatcgaaaacactgtcccgtgaaaggaatccgtaacaacatattccgcatccataaatccacgtaaccaatctgttacaggaggaaaaacacattgatcaatatctttcttccctacttgagcaaaattcttttctggcatcacaacattgggagacaagcttaaagtttgagaaattttccgaacaatggcttgtttctcttccgactgatctaaaatatacgtcattaattttttctctgaagacggtatctgttcttgctcgaccaaacgaatataatcttctttattcaaaagcatcgtcgggtctaacaaatggacagcatcaacacccaagtattttttgcataatacaacaccactatcttcacgaacggaaattgcgtcaaattgcttagctaaagctgcacatcgtgttgtctgcccctccgtaaattcccacttcgaagtaccaaaagaagctgcataagctatgcgtttaacatgctgacctattgtaaaatctaaaaaataatttgataaacaataagaatatataggacgccaaacttgatcacttcctactaaataagcatcaaaatgatactttcgtaactcctttttagtgttcgatgaaataggctctgtagtcgttatgtatttacgaataaacggaatagtcttttgagccatatactgttcttgtctatcagtaggataataaagtcccttatactttatcagacgtgcaatcaattgtttcacgttaacaattaaaggacgtttccattttcgatcttccgtccagacctcatgccccatttgtttcaatatcgcctgcaatgcataagcctgaagtaatccaccataattagtatgaagaggttgggttaatatacagattctcatctttaccgtattatttattcaatatcttctttattattttaatacccttttctcctaatatttcctttgctgtacttctcatcattccagtagtagatacatttaaattattgatgattcgaatcgcttcactctcatctgcgttatcggtgaaaacttctaggatcatcggtcggtccgttatctcaggaataagaaaacgatctacaacttgtacatattcatccttattattagcactcaagtactcataacctaaatcttcagcataatgcttgattaatacgtgtgacttatttccatagtgacctccagcggcaataaatgtatcagcctcttcaccaaaagcagcacccggatgcatgtaattgcggaactccgtcccctttccattgtttataagcaaaattcgaacattattacctacatgccgattacccaccacgttcatatcataaaagaaagcaaggtctcctatcacaccaaaatacaaacgattcggatgaacaagagatgcaccgaccagcgaagatacattaccatctataccaaacccacctgtattggaatatgcataaacttcatttttttttgcaaagaaattccatgtacgcagagtattcaaaatacctaaatgcaacacacttcctgcaggtaaacgatgagcggtctgcaaagcaatccaggcattagaaaaaggaagtgtttccggcacttttgcccatatagctcgtagctcttccatacaaatgtccaaaaaatctgtacgctgtatacagtttgtatcagcataatgttcaaaaaacgattgctccggcatttcaaatacatgggtcaaacgttgataactatctttcaattcaccatcaggattcacacgccataccgttttaggacacatagtaatatacccaccagatatttcgccaatatgtatcaacaaatcaatattcacaagactacatatatcttgttcctgtgatgtaagaatagataacggaacagcatatttcccttcataaccgcttgtgtgatcgcaaaagacaacagcatcgtgtgtgccgcagaagttatcaacagcttttttttccgactcagcaaatttcagatgcgcaccaacaaaaattgcagtacgccctttaggaaaaggaggaaactcctctcctaaacatatacgcctaataagacgtgcctgcggcaaattctttatcgaaaagtcacgactataaatagttgtaaggtttatatgcaccggaccaccgccccgatgtcggagttctagcaaagcacgattgattttcacggtattgctccattcgtctgcatcattaaaagtaacaggaacatgctcacttaataatacaatatcattctgaacaactcgacgatcaattacttgaggaatcagatgtccaatgcgattaatatcctgtgtacttgttactgccaatattggtaacttacgataataagcttctgtcaatcctgatacataattccgcgaggcagttgctccagtacaactcaacacgacaacttcgccagattccgctgccataccacaagccatataagcagcactacgttcgtccacgctagaatacatctcaaaccaagagtcttgcattatgctcgccacaaacgttaaattggtcgtaccgggggaggcaactatccttttaatgccatgctgtttgagcaatgatataagtatttgaacgcttcgttcagcagtgtaatatttctgattcataaatataatcaatttttatcttatttagttagaactttaacaatctctgtcggtgcataacgagcaactaagtactttaagcgagacttcaacgtggaatatatattcaagcgcatccgttccccagtcactctatccatttgagcattcagtaaaagagcaggagaagagaaaagtggcgattctaaaaacgtgcctagacaagattctatttcatctctagtatttttgaaacgaagtgtaggtacagcaagcctgatttttgaattatcaaaacgacgatcaaacagtcgacaatactttacttgaaattgcatcgccggaaaacgcaagtttaagcatttatctgtcataacaacttccggacggtgacctaagtatttctctaatacatgaagataaacttctaaaatttcttcccatttataagcttcatctgtagtaatatgatatacctcaccaagagccgcaggtaatccaatcaatcccgcaatacctcgagatacgtcataaccatatgtaagcgtggtgtaatgcgatgcgatgtcttttgaaaaaacaatagaatagccgttcatagcacgccaaagccaatcctccttttcaagtaccccaagctgaagtcgtgtttcactaaaagtgatataaggtctgataatagtccaattattacaacctgcctcgtgaagaatattctcctgtctggcttttgataaagcatattcatcagtattcagatattcttcatccttaatcatatctagcagacgtggcgtttcttcattaataagctcatcagacgaagttgttggaccataaacacgggcactactaatgaatatatattgttttgtagccttcaataactgagaaacacgaacacgaaattcatccgtattgtacaccataaaatcaacaattgcatcccaagattctcgaagcaaatcgttaataaacgtaatttcatgcgcattcccctgcacataagtaatattcctctcagacaaacgacagctacgcgtagttacgtatacatcatcaccttgctcagcaagtatacgagtcaaatgctcccccatagctccagtaccaccaagcaaaaggatacgacgatgtattgtcttcttttcttgatcaatcattctatcttaattattttttatatagtgttccaatcttacgaattactctaaaaggaagatgggctagccaatttacgtatacaaccaaataagcgaaaggacgaaaaggcaagctctttccatgtttatttgcaaaatctacattgtcacgagcaaaaccatccgtattgtatttatatacctgcaaacatttatattcccatgcatgttttttccattgccttatgtcaaagactgttctaaattgatctaattgatcaattgaatctaacgccatcatagtacgtaaacattttgtgcaaattccacaatttgttgcagatacatgttcattagatgaattaacacaaacatttaaatgagtctgagctaacttattattaacaatcctctgtgtcttttctgatcgtttatattgagctccatcgcacacaatttctaaattttcaggacttaataatggcatgatataaggatctgcaaattcttcaagaaaaactctatcacgggctaaatctatcatttctccataagtatatgtattactaatataatacctctttagtgatttctgaaaagccaaaacactcgttattctattcaaaacccctgctttatactcccagtctggtaaatagaaatcaaataagttcgtattcatcataattgcccgagttcctattgtatttgcaaatgatctagttatttcaaaacgattattagctctttcccatgtacgaggatttttcacatcaccatattgacctacatgaaaaaaaaataaagtatcaattttgtaatcaagatcatctgtatcaaaaaaacgatcttgtaatgtagaaaatgaatctacccctccagagaaccccgttccaatgtgcaacttctcattcttagatgcattcttaaatccctctacaataattggtaccttatgaaaagaaggagcaaaatccttcactatcgccatcacataattgacaacattatgataaattttttttgaaacaacccctgaaatctcaataggttcattataatacattgcagggtaaattgcagccaccaaaaaggcatcataaacgtcatctgtcaaccaatcagcatacttatcatctacactaaaatagagttcttttgttctactgaagttacattctacatcgcaaatgagacaaaccgattgaccattttcgaatttattcttcctttctaatctaagatttgataatttcatctcaacctttaagttttatttttttctttatagtttctacaaaaaaagtggactcatgtttattaagtccgataagatatataatcagcccagtaaataagaatattatcatagctgaaaaaataaaattccaaaacggggtaaaaaaacgaatatcgatagtagaagaaaataatagacacaaaacaaatacagctacagaacgaaaaagaacctgattaaagaaatcacttatttgaaaaccgtactttatatgagactgccaaagtaaagcacaaataacaaaagccttaaatattatattgagaataaacacccattccggtgcaaatccaattctaagaaatagaaaagaggctaaaagatttactaaataaataatcgttaggcaaatctgatacaatctaatattaccttcagacaagacccctgtcacaagtggaccagcaaaacaatccaatagagaatacaataagataagtatgataaaagatgatgtgtgctttggcacttctacaagccataatcccacaacataatcaatattcgccatcaaaggaaagaaaaaaaacaacaaaataaaaaaagcaaatttttcgctacgaaggattaaactatgcatataactaacttccccacttgaatatgatttcgttatctgaggattaacagccataaggaaattatttacaaagccatatacagcagcattaacctgcatcgctatgccctgagctgcattcacaacaggaccacaatatatatttaataatatacttgagccttggtctttaagaacaactactccattcccgaaaaacgcccatccaataaatcttgacatatctttaagtaagactttatctaatataaactgataatgagcctctttaaaatgatgcttactatagtatccataaacaatacgcataattagagatacggacataagcaacactgaccataatatcaatttatcccctgggaataagtataataaataacatattactaatttcaaaataacctctaggatgctaatgtaagcaaatgctgacattttttcatgggcaattatcaatgaattataaggtacgctgatgagattcaccataaaggttattattgaacattgaagcacccaatttgctgaatataaacgatttgtcggtatattcatttttgtattcaagaaccatacacccacaacttcagcaactaccataacaatcaatgacattactatctggatattcacagatgtgctgaatattgtatttagcttttgtttattgcctatacctatctcataagttaaataacggctaattgcaactgacaaagatccagatattattgaaaacatagctacaacacctcctacagcattgtaaatgccataatcttctacgcccaatgcttgtaaaattattcgcgaagtatagagtgaaactgcaatgataaaaagcatccgaacatagagcattgcggtattctttgcaattcgtttattgttttcaatagtggcaaacattcttatataacttcttttatatttaatgaacaaatcatacgactatagtcatcttaactacattatagttcataaatgtattgttttcaatcatttaccttccccatcaaggtactccagaaattctttcccatcaaattccaaacaatgacactaattacactcaaaaatatagataccaaaacataaattttcaaactgatgccggatgaatttaatggaatcacagcaggctctactactgcaaatacgggcttttcttcctgaactttcgcccttgcaacttgtagttgattggctacctgactgtaaacttgataggctagactcatgtcattttgtaatcgctcttgttcagcacggacactttgaagaatcaaattatcgtgcgtatccacgtattcagcatatttcctttgggcatcataatattcatcttggcgctctttgaataacatctctaaataaatacaatcctcttttgcttttgaggtacgatagccaatgatgtattcttgcaatttatgaacaacagaatcagcaacaactgcagcgattctaggatcttgcaaggtaactactacattagtgatagctgttttcttatctacagaagcaataatatttttcttaagaatctttattttcttacttgtcttttgggtaagttcaataggactattgtttgttttatcaatatactctttattctcatcctcaaataaggattttatgccactaattaccaaaccggggatacccatcacataactccaccaagcagaagattgctcctctaaataatattccaaagaagtctgttctactttttttgcgcttggaacattcatatcaagaagttccaaaagaaaaggagtagaggaaacaatatctgatgaaagagaagcgtttaatgcatcagtaccatctccaattgttgcgccgcttcccaaaaatgaagctgcaagtccggcaatcccattagtgcctttggaatttcccatttcaggtgacaaagtcactttgactgtatattgtttaggaatactaaatgctactataatccccataatcaatcctattccggcagctttatataatgtcttgcggatgcttattatcttacgcagaatatccatcaaatcgatttccatctcatcatttaataatttatcctgttctgaagagatatttctatttagttgtttttctgacataaaagtaaattctattatttctttataagattagcaatagaagcaatcatcattcccaaagaactgaaggaagtagcataacctaaaatattagctatgttccctttcttcttagccttactaggcacaataatctcacatcccggttcaatctgtttcttaccactacccttaaccttcgtcacctgaccattcatgtaaacaatgaatttcttactcttccttgcattatcagaatagccaccggcctgattcaaatagtagtctacatcctttcccttcatataagaaaccgtattcggaaccatgacagcaccattgatagtcacagtattattattctttggtatgaagaccacatcaccttcacgtaagacaaggtcggcactacccttaggattagtcaaagccttctccagatcaatgcctaccgtaaaggtatcctcaacaccaatacccaaagagtcaatcatggcctcacccaattgcctgctcatcaagcgaatcacatcacccatacgtttcttttcactagcgttagccacacgggtcagtttcgcaccacgcagataggcataattggtcggaccgccggctttattcactaaatcggaaagacgttcctcacggctggtcatggcgtaatttcctccgaaaaggatttcaccttcaatggctacattctgttgtgcctgatagcccggactgcgacggacataaacctgatcataaggctcaaggataaaaccgggctgaccatctattacaaaaccatcctttaaagagaaggtatacatctgaccaatcgtatcattatccgcagtactacgaggattcttgattcgtctcgatatatcaatacggacagtagaggcggcttctttcaagccaccggcctgaatgatcagatcctcaagtgtcatgttatccgcataaggataggaatcaggttgggcaacctcaccgtgaactgtgacattaccccggtcttccaggtcatggatacttggaatgtagaggatgtcattcttcattagggcaaggtttggggaagtgccgtccatgatagacttaatgtctatctgaacaacttcactggtcaggtcttcacgctggcgatagaggacggcacgattcaggaaagcgtcaccggtcagaccctgagcttcatggacaagttcgcggatcgtgttcagtttaccgctgagctggtagataccgggacgatagacagcgccacggatttccagtttgtttgtgaagcggttaaggatggcttcggctgttacaacgtcaccgttacgcattgtgtagatgctgtagtccatatccttgaccgtgttgacctcatattcctcaccattctgacggacaacacgcaatgaacgggtgtaggcatcggcttcaaagccgccggcatatttgattaaagtggcaaggttctcgtctttcttcatttcgaaacgcatagggcgttttaccttgccgctgatctttaccaagacatcataggcggggacgataaccacgtcaccttcctgaaggcggatgtcatcctgtgtgttgcctttcatgataaattcgtaaacatcgatggtggcgatattctttccgttgcgtaccaactgaacgtttcggaggctgccgatatcactcacgccgcctgcacggtaaagcgcatggaagacggtagagaaggaagaaagggcgtaggtacccggctgcacgacctctcccatcacattgatctggatagtacggatattacctaaagtcagacggatgtcggaagtagggtcagtagtattgttcaggccgttatagatcttattcagggcgcccttcagatagtcgttggcggcggagactgtcataccgctaaggttgacaggcccgatcttctgaatattgatggtgccttcaggagagatctgctggcggatcgtattctggctagcaccccagatatcgatgatgacttcatcaccgggacccagacggtaattggcaggagtggcaaggttgacactaggctcgaacgtcaggttgcgggtattgaagatattgcgcccgaaaacctggtcctcacgggccaaatcttccgtagtcggatgatcttccagcatgtcggaagtattttccttagtctcttcacgaaggcgggactcgttgatatccgtacccgtggattgggaggtgtttacattgttctgctgctcatagagctgcttcacacgcatagcctgttccttggtcacacctttacgcgcaagttcggaagcaagctgtttctgttccttgccttgccggatgccgtcctttacatattccagtacctgtgagtcactcatggactgggccataagcgagccacttcccagcatagaacaaaaaagtagaatgctaaaaagtcgttgtattttcattgacaaataaaaaagttagttggtttcacacagttcctgcataccatgacagaccgcagacaactgttgtttaagaagagaagggggaagaacatcaaggagggtcagagaacgctgcaagacagaccgttttctatcctcgtcttccggattggcgtacatcgacacattatatccctgaaggatggccaaacacagggtagcatcctgctccggtgtcttcccccgttgtgaatataaatcgtttatctgtttgtggatggatcgttgtaaggcggaaaggtcatccagatacacgcagcctgcactccccccaccaggaagcagcatgcgtaccaaatttaataaaccctctatgttttcctgtaaaataacagcatccatatccctcgccttaaacagccgccataataggctctacataaccgacaggcatatccacacaggcacatcccagcatattcaggcgaacggcgatcttactcttgccatccacatgaaccagttcgccaacaagacccgtcagggggcctttaatcacgcggaccttttcgccacgggccaaaggggcactgttcatgctgatcgattcttcagaataatcaagcatgaaacggaaacgggccatctgctcgtcaggaattacggcaggactactctcgccgcgcatcaccatgtaacggctcacagtagaaaaactcaggacttccatgcgttccctagggtcaacgtgtacgaagaccatcataggaagcaagacggaggtgaccagcttgcgacggtcgctccattggtggaattcctgttgaacgggaacgaaattctcgatacccatcttgtccagatgctcggaaaccttcttttcatggtgcatccgaaccaaagcaacataccagcgttttgagtgtgctacgccttcccctgtcccataaataggcccagcattgagtgatttcttttttcttaaaatcatgtttttttaccccatgtttatccgttacttcttaggtaactcacaaacaaaggacaagcgaaacagggaacttttttcaacgaaaacatcggaagaggactggtattcaggaaataaggcagaagtgaaggggtttttcataaattggaataaaaaaaagacataacacggatattgtcattttccgtatgttatgccgacttttgattcattttaagaaattaatttcatttttgtttgcgtattttcataaatatgtccatctttgcgccatgaatcattccgttacctaagaagtaacacacaccgataaacactgtatatcaggattctaaatcaaacatacaggccagaaccgcacctcttaacgtaagacaaattcatccggtttacctccgtacgctctttcagctcaaagcctttcagataaatctgcgtggtcttgatcgacttatgcccaagggactcgctgatcatctcgatagggacaccacggtacttggcggtggtagcccaagaatggcgaagcgtgtaggaagtcacggggaagttgagacgtagccgctttgccagggatttcaggcagtagttgaatctccggagagcggactggtattcacggtaagctttctcatccttccttttcttatctccctgaaggatgccgaaaaggtagtcgggacagccgggacggggagactgccggttacggagctgctcgagcatctcctgtgcgctgtccagaacctcgacgctcatgggagtctttgtcttgacacgattgtagcgcagcacgttgctgtcaagagcggatttctccagatgactcagatcggcgaaagacatcccgcaaaactggaacatcagagcggcgatagcctgggtacggcggagacggtcagactgggggtcttcataaagaagcctgcgaagtgcgacgacgggaagcgcccttttctgacgaacatccactcccgtatagacctcatggaacaggcggtggacataaggagcactacccgcttccacaccacgattgtagatactccgaagcatacgcatatacgtggaaatcgtattgggcttcagaccacatgcgtaaagatgctgttcgtaacggcgaaggcggtcacgggtgacttgacggaaggacacactatggacaccacaaaacttgctaaaagaaagaagggcgttctgatagacatgcgccgtagaatagcggccctcctcgcgcaaacggccgatatagatatcggcacaacgactaaatccatttttattcattatttacatcactagttagattacacgatacaaattaagatgaataaacgagaagtcttagttttatcttgtttgactatattaaaattactaaaaaaggacttctgacatattttatgtcagaagcccctttaaaataaattctttgagaaaatttagtttctcaaacccaattatccattcacctttttataatcttccaaaaatttcttcaatcccgaatcagtcagcggatgattcaacaaccctttgatagcactcaacggacaggtagccacatctgctcccatctccacacactctatgatgtgcttcgtattgcggatagaagccgccaatacctgagtcttgtaatcataggtgcgatacatacgtacaatatcaccgacaagccctaccccgtcttcgcaaatatcatccaggcgtccgacaaaaggcgaaacgtaagtcgctccggcttttgcagccagcaatgcctgtccgacggaaaataccaatgtacaattggtccggattcctttttctgtaaagtacttgatagctttgataccatcggcaatgcaaggcaccttgacaacgatatgcggattgagtgcggcaagctcttccccttcgcggatcatcccttcataatccgttgctattacttccgcacttacatcagcattgacaatcttacatattttaatgtaatgctcacgttgattctccgtacctttaatgccttctttcgccatcagcgaaggattggtagtcactccgtcaagtactccgaggtcatacgcctcctgaatctgctccaaattggctgtgtcaataaaaaacttcataattctattttttaatggttaactatctggtagtcaaagataagaattatttctcatctttcctagatcaggcaatggttattgccggatcgaggtagacatcctgaatagcgtttaataattcgacacccttattcatcggcttttggaaagctttacgtccgctgatcaatcccatgccaccggcacgcttattgacaactgctgtaatgaccgcatcacgcaaatcggaagctccatgagattctccaccggaattgatcaatccgacacgtcccatataaccatttgccacctgataacgacagagatcaatcgggtgttccgatgtgagttccgtgtacattcgttcgtctacctttccgaaaccaatcgctttgaaaccaccattattggtaggaagtttctgcttcacaatgtccgctttgatggtaactcccaaacggtcagcctgtccggtaaggtcggcagcagcatgataatcaatagctcctttcttgaaatcgctattacgcaaataacaccacagaatggtagccataccgagttcgtgggcatattcgaaagcctcagcaatctctaccaattggcggcgactctgttccgaaccgaaataaatggttgcgcctactgctacggctcccatattccaagcctctttcaccgtaccaaataatacctgatcgtatgtattcggataggtcagcagctcattgtgattcaactttaccacgaaaggtattttgtgcgcatatttacgtgcgactgatcccaaaataccaaatgtagaagctaccgcattacagcctccttcgatagccagcttcacaatattctccggatcgaaataaatgggattcggtgcaaaggatgcgccggctgtatgctcgatatcctgatcgacaggaagaatggacacataacccgtatttgccagacgtccatgccctaaaagggtttgcaggctgttcaatactttaatgttccggtccgaatcaatccagactttatcaatggtatccggtgagggtatataaatcaacgacttatcaatggtcttacaggtatgatccagataataactggtcttatctcctaataaatcaactactttactcataactttatttttttaatgtataacaatttatatacaggcgatgaagcctgctattttttcttcccctgattggctaccgcttccatcagcttacgaatttcttccggattgcccaggaagtaatcattggcaacattcaggttctcgtcgaactcgaatacataaggaacggcagtaggaagattcagtttgatgatatcttcatcagaaatatgtttcaaatgcttaatgatacctcgcagactattgccatgcgcgacaaccagcaaggtatgggcatcttttaaagccgggaatatatccgactcccagtacggcataatacggtcgatggtatcttttaatgattcggtacgcggcagttccgcatcgggtacttcgtgatagcgataatcgaaacgcggatttctcaaatcgctttcggaaagcggattgggagctatatcataactgcgacgccagatcagcacttgttcttctccgtatttctcggctgtttccgccttattgagtccttgcaagtcgccgtaatgcttctcattcagacgccagctcttctcgacgggaatccagtccagattcattttatcaagcacgcagttcaaggttttgactgcccttttcagataagaagtataggctttatcaaagttgaagccatattccctcaacgtgacgcctgccttttccgcttcggcaactcccttttccgtcaggtctacatccgtccaacctgtgaaacggttttctttgttccaagcactctctccatgacgaagtaatactatctttttcattcttaatggtctcctttcttctttttatatatacaacattttgtttctctacaaagttcacgaaagaatcagcaggtatcaatacctaaaagtgatggtttattgaaaagaattcaatagaaatgactatttttacggactaaatgaatattcaaccgccaacttaaaacaagtcagacattggaaacaagcaaacagaaagaatacacattcctgcaaaaactgctgaataaagcgaatatgggatggtgggaagcggacttaaaaacagaaagttatgtatgttccgagtttatctcccgattactcgggatagacgaagacggagtgatcagttttgaagatttcaataaacgtatcctaagggaggatcagcaccatactaccagctactctttcgataaattgcaacagagcattgaggaggtgtacctgctcgatactccccacggggaagtatggattcgcagtaaaatatgctttcaggaaactgatggggaaggaaacaccaaaatatacggaatagcagaaactcaagatggtccacgcatggcttccgcctatcaggcactgcaaaacagtgaacgtatcctgcacaatatctataaaaaccttcccgtcggcattgaactgtataataaagacggttatctgcttgacttgaataaaaaggaactggaaatgttccatatcacccataaagaaaaggttattggtatcaatatctttgagaatccggcactacccgaagaaataaagctaaagatcagagataatgaagaggttgaattcaccttccaatatgatttttcaaaaatcaaaggatattatgaatcggaaaaaacatccggtttcattaatctgacaacaagaataacaacactttatgatcatgaccggcagcccatcaattatctgttgataaacgtagataagacggaaaacaccatcgcctacaacaaaattcaggaatttaaaaatttctttgaactggtaggagattatgccaaggttggatacgctcattttgatgcgttaagccgcaatggttatgccttaagcagctggtataaaaatgtaggagaagaggaaggcacgcccctaccggaaattatcggtatccattctcactttcatccggaggaccgggctgttatgctcgactttctggcgaaagtggtcaaaggcgaaagtacgaaattatgcagggatgtacgtatccgcagagccgacggaagttatacgtggacacgggtgaatgtgttggtccgcaactaccgaccgcaggataatgtcatcgaaatgctgtgtatcaactttgatattacccaactaaaagaaaccgaacaaatgcttatcaaagccaaagagaaagccgaagaagcggatcgtttaaaatctgccttccttgccaacatgagtcacgagatacgtactccgctcaatgcgatcgtcggtttctcaagtatgctggaagaggcggaggatcaggaagaaaagcatcagtatatcacgatcatagaagataataacaagttgttgcttcagctcatttccgatatcctcgacttatcgaaaatcgaagcgggaactttcgacattattcctgaaagagtaaatgcgaaacagctttgcaacgatctgtttcaggctatgcaaatgaaaactagtccgcaagtagaactccgcctgaaagataatttacccgaactgacgttcatcagtgacaagaacagactgtatcaggtattgctgaactttgtgactaacgcattaaaattcacttccgaaggaagcatcaccatcgactacaagatagacggaaacgaagtaaaattctccgttcaagatacgggaatgggggtagagccggaaaaacaggaagctatcttcacccgatttgtaaaactcaacagttttattcccggtacgggactcggactgcctatctgccaaagtatcgtcacgcaactgggagggaaaatcggtgtggaatcggaaccgggaagagggtcttgcttttggttcacccatccaattaattaaagaaaaatctcttttaaattgctctgtcatccctcactaagttcggaatggcagagctaaacattatttttcagacaacagtccattttcatcggtttctcttcaggaaaatacggtctgtaatagtgcccggcaactctgattcgtagtgagtcaccataatcatcgtcttgtctttgcgatgacagaaagcctcaataatcttctttacccgacgacggttgtaagtatccaaaccgtgaagcggttcatccagaatcagcagctcagggtccttcacaaaagcacgtgccagcaatgccagccgttgttctccactggaaagttgcagaaaaggtttgtctttcaattccgcaataccaaatatatccatccaccactcgcagatggccatttgttccggctggggacgtttgtaaagcccgatgctgtcatgaagcccactggccacgatttcaatagccggcagatttttgagataggcacgatgcatctccggacttacatagccaatatgctttttaatctcccaaatactctcccctgtaccccgcttccgcccgaaaaggctgatgtcacaagcatatgattgcggattatccgcacagacaaggcttaacaaagtagattttccggccccgttttcaccgctcaatgcccatttctcaccacgccgcaccgtccagtcgagatctttcagaatagtgcggtcatcatagcgaatgctgactttattcagtttgaccacttcatcagaatcgtaattattgccatcatagggcaaattgacgatacgctgctgtaactcatcaaaagaaacggctgcatctctggaacgaaaagcttccagataggcctcacgttccattttggggtacaccgtcattttatccacaggaattacatgggtaataaatgaaggaatatcatccagcattgacaataccagaataatctgtacggacgacatttttgtcaagcgatcgagtaaagaaaacagcaactcgcgggtaggtgcatccagaccaataaacggattgtccataatcaatacacggggagctgtcagcagagttttgaccagctggaatttacgcagttcgccactggagagaagaattattttcttatcgagcatcggctcaatgcgaaaaagctcaaacagttcttgtttcagttgttcgtccttaatttctcccagcatttcacgaacatcgggtgcttcgtcctgatcgtgggcgttccagcgttgctgatagtaataattagcatcggcagccccgtaagtgtcacggaaagcgatgtacttcacattatcatagacggtctgggtggcagcaggagaaaagtcatattgcagcgtcccttcacgcaatgggtatttaccgatcagcgtatcgacaaaaagactttttcctcctccgttgggacctacaatcgcaatgtgttctccggctgaaatcgttgccgtgatgggagcagctaaacgcacaagcgggttgcgtgctacgccccccgctatgttgaatgtattttgaatcatattcttctattctgtttgattatcaaaagactgaatttacttatataaaatcaaagccgactgaccgggaataataacttccggcccgttttgtatgcctaatccacgtacatctatcactccgtctttacataccactgtatatttgcccaccggaatagtcagcctggcaggagtagggcgagaattaaatgcgacgatgatatcttcccaatgatctccatttgcatggtctttcaggcgaaaagcaatcaggttgcttccttccacaggaagaaattccaaatgtttccgaacctgtcctgcatctcccatgcggaaggccggatgagatttacgcaaatcgatcaatcgtttataatacatgaaaacatctgcgttggtggttttgcgccgccagtcgatggcattcactgcatccgggctcttataactattgtccacgccttgcttatcacgcatgatttcttctccggcgtaaataaacggaataccttgtgaagtaaaaaccacagtctgtgccagtttatcgagacgtataagttgttcgggagtgatgtccggcatgcttgccttcagtcggtctaccaaacacagcccgtcgtgacaggaaacgtaactgatcatttgcacaggctgtttcgcccacggcttttgagtataattaaccgaatcacactgtacttgcggatgctcgatagctcctgctatgccgaactttacgctcatctcccctcccggaattccagcaagaaaagctcctttgcgcttatcgcccacaggtccgcaaagcccgtcacgcaactcgtcagagaagacagcgactccgggtatctgtgctatatttcccttcattgccaaggagtcagccggatactgaggcgcttcggcagcccacccctctccataaatgcaaatggtgggatcgaccgcattcacagccttccgtatctcgttcatcgtttcgatgtcatgaattcccatcaagtcgaaccggaagccgtcaacatgatattcttttatccaataaaggacggattctaccataaacttacgcatcatagggcgttcgctggcagtctcgttaccacaccctgagccattcgccaacgttttatcttctttctggcgatagaaataaccgggaacggtccgctcgaaattactctcatcggtattgaatgtatgattgtacaccacatccattatcacacggataccagctttatgcaatgcctgtaccatctgcttgaattctttcacacgagtggcgggctgatagggatcagtggcataggaaccatcgggtacattatagttttgcggatcatatccccagttgtacgaattttcattcagcctggtttcatctaccgaagcgtaatcaaaggaaggaagcagatgcacgtgtgtcacgcccagttcgatcagatgatcgatgcctgtcagcaacttgtcggagttcatcgttccatgttcggtcagtgccaggtattttcctttattcttcactcctgaagtggaatcgaccgaaaagtcacggtggtgcatctcataaataatcatatcggcgggagacttcaaaggaggtcgaatatcactctcccaaccgtccggattggtggattgccagtcgataatggcggcccgcttcccgtttactccgacagcacgggcgtttattccgggagtatctccctgccacttgtcattgatcttcacattgaaagtatagaacttgccaatgaggttcttacttaccacagctgtccaggttccttcttcccccgactgcatctttaccgtttcataggcatgtccgccctcgcctgcctcataaagcatcagacgtacttcatctgccgtaggcgaccaaagagtaaacttcgttgcctccggtgtatactccatttcaatcagacttcctgtacggaccggatataattcataagacatatattcctttttcgcagtagtacaactcattactgtcgtcaccgtagtcacccctaatatcgctaaataattggttcccattttcatactaaacctcccctgcggtactcacactaccttcgcacttacttgtttattactattctcactcccagcctctttcattgcgggtttattttactttatcgggatttttcgcaataaaatctttccaactgctatatcctttttccattgccggacgtcccatttgcagaaaatgacaataggctgccgccaaaccgtccgtcgcatccataaaggtaggcatctcttctttgggaaaatgcagcatacgctgcaacatatccgctacttgttcctttgatgcctgtccgtttccggttatagccatcttgatcttcaaaggagcatattctgtgatcggaatatcacggctcaatgccactgccatcgccactccctgagcacgccccaacttcagcatggactgtacgttcttgccgaaaaaaggagcttcgatagccagttcgtcaggcagatagctttcgatgatacttaatacccgctcgtgaatatgccgcagcttcagataatgattggcaaatttacgtaaatcaataattcccatcgcgatcatctcaggcttagtccctttcacgcgcaggattccatatcccatgatggtcgtaccggggtcgatacccagaataatcttttcttttaccggctgaatcactctactatctccatcaatgtcggaaaaccgactactttatccttgaatattttcgtcagttcatcattcagtcgtactccctgttccatgtgccagcgatgcagcaatccactactttctacttcccattgcagagaataagaacttccgtcgtcccgatggctcagtatccgacagatacgcggtgctctcaacgtcccgtgtttctgtacttcaggtatatagctttcctttatccaaatcaaaaaattatcgtgaacagcatcgtccacctgaaaagttgtattataaatcagcatatcatctgtcctttcaataaattattttccgcaaacatagcaattatttcagaatattccattatatttgcgccaacaaaagcaaaacgttgacaaacgttatatcagtgacgtaaaaacggggcgttagctcatctggctagagcgcgacactggcagtgtcgaggtgatcggttcgagtccgatacgctccacaaaatgaaaagagtaacttatgataagttactcttttttttattttaaacctgtgattggctttgtagtcagccttcattaagacacttttatattaccccgaattgtttcaaagccttgcaaagcccattattgtccaccgtatcagtgacaaaatcggcaactgactgaactttttcggacgcatttcccatcgccactcctattccggcagccttcaacatggggatatcattaccgccatcaccacacgccattatttcagcaactttaatcctgtagtaatcggcaaataacgagagaccagttgccttgcttgtccctgcgacattaacatcagcgaataaaggatgccagcgcgttgcggaaagacccggcagaagcggcatcactttttgttctgtttcctcatcaaaataaaaacaaagttgacagcattcttttttatcaaacatctcttcgatgtcgacaaccggtggaactggatgctcaacaattccggcaatctgttcgacagtcggggtaaggcgattgacaaatacaccttcatttaattcgagagcgactgcaaaatcaaattcccgtgcaagctccattgactttctaaagtcttgtacaggtattgctacttttcttatcacacttccgtcacgcaatacacactctgctccattaagtgcgataactccatcatacggcacagcgtcaatctcatgaagatcatttgccgccctaccggtagcaatcacgatcttaattccactatcatgtacttttttaagagcatctatagaggattgcgacaccttatgagtttcaaaactcaacaaagttccatctacatcaagcaacaatgcctttatcatactatctatatttttaggcaacaaagttactgaaaagtttctcatagcctacaacgacaagcaccagatctcgttaaaaaagatatcatatatacaataaaaaaggccctttattcaaggtccttttttatcacttcatccatttcttttattcgtttctcacgatccttgatgggaccgtctttcgtatcacctttgaatacattatctgcacgatcggtaacttcagtactccattcttcaaactcattcttagccggacggccattcggttcgatattttcttcggctatcgaatcgtgtctgttaatcatatcatccatatcttctctttttttattggttacaatgataatacaatataaaaagagaaaagttccgggcattaatgttttttggacaactcgcgttcgcgtatctgcaactgttctttatacaactggggacggaaagggacataaagggtataatcactttcaactgccttgcctcctaccagtgccggtgtccacttcggcatttcctttacaatgcgaagagcttcttcggcaaactccgaatgagtcgattttaatatatgaggacgaagaatcactccttccttatctatagtaaactcacacaaagcatatcccgagacattgtctttaagcaattctgcaggataaatcatttgtccggctacatattcccgtacacaaacatcagccaagcagggtaattcttcaatttgctttcccgaatgcgttttgagcttcggaccgacagaataaatccccacatacatcggctttttgtgagcgtccggctgttctttggtacggttctccagttctttcaataaagcggtcgcttcctccgccaatgcttgttccgaaatattttctccctgagataacatataagccgactgacaaaccaacacaagccgctccatcaaagtacctttcatgggtgaccacttccgtcccatcatctcttttcctttcgcatctgtcgatgagaagtaataaacaactccatccagtccggctgtcgaaccgtccaaatcctgtatctgactggttaccaaacgggcgatagctcccaaagactggtataaggactgactgatctccactgatttagtttccactttcaccgttcctttctctgcctgccaataggtacgcgacaaggtattcgcaatcaacagacaacgtccattcttcttctctaccgacattgcatattccggcgaaaaagaaggaatggttacaaaacgcgcgtaaggacgctgttgaaaacctgtattaagcaaagaaaagacatttcgataatactcacccaactcacccgtataggtagtaaaaggcttcaccggctccagatagtcgatctgagctgacaggcgaaacgataaagtcaatagcagaagagaaataacaatctttttcataagtgttccccgattttcggtacattcggcaacaaagatacaaattatttcgatggttcgtgataaaattatatctttgcacggtttttactaagaaactgaataacaatacatcaaaaatatgatagctaagattgaacaacttctgaaagaggtggaagctttgcacgcctccaatgccgaagaactcgaagctctccgcatcaaatacctgagtaagaagggagccattaacgatttgatggcggatttccgtaacgtagctgccgaacagaaaaaagaagtcggcatgagactgaatgaactgaaaactaaagcgcaggacaaaatcaatgcgttgaaggaacagttcgagagccaggataatagttgcgacggtcttgacctgacccgctcggcttatccgattgaactcggtacacgtcatccgattacaattgtaaagaacgaagtcatcgatatcttcgcacgtctgggattcagcatcgccgaaggtccggaaatcgaagacgactggcatgtattctcggcactgaactttgccgaagatcatccggcacgtgatatgcaggacacatttttcatcgaagctcatccggatgtagtactccgtactcatacttcttctgtacagacccgtgtgatggaaacttccaaacctcctatccgcatcatctgtccgggacgtgtataccgtaacgaagctatcagctaccgtgcacactgtttcttccatcaggtagaagcgctgtatgtagacaaaaacgtatcattcaccgacttgaaacaggtattgctgctcttcgccaaagaaatgttcggtgcagacaccaaaatccgtctgcgtccgtcttatttcccatttacagagccaagtgccgaaatggatatcagctgtaacatctgcggtggtaaaggttgtccgttctgcaaacataccggttgggtggaaatcctcggttgcggtatggtagacccgaatgtactcgaatcaaacggcatcgacagcaaagtatacagcggttatgctctcggaatgggtattgaacgcatcacgaacctgaaatatcaggtgaaagacctccgtatgttctccgaaaatgatacacgcttcttaaaagaattcgaagcggcatattaaatagagcacagaatttaccagtatgccaatgtgccaataaaaccgtctgacggtaattgggacattggcatttaatcaatataccgattacactgaaacgggatggcttatcaccgttccgatcagcaaattgaacgttcacttattatggcaaaggatagactcattactcccggttattgtttcatcttggcagccaacttcctgctctacttcggtttctggttgctgattcctgttttgccgttctatttatccgagttctttcaggcaggaaattccacaatcggcatcgtgctttcctgttatacggtagctgcactctgcatccgcccgttttccggctatctgctggatacgtttgcccgtaagccgctttatcttttcgcttatttcatctttatgctgatgtttgcgggatatcttatcgccggctcgcttaccttatttattatattccgaattattcatggagtctctttcggcatgatcacggtaggcggaaatacagtagtcattgacattatgccctcttcccgcagaggtgaagggctgggctattatgggctgaccaataatatcgccatgtccatcggaccgatgttcggactgtttttacatgacggaggggtgtctttcgctacaatattctgctatgcgctcggttcctgtatgctgggattcctgtccgcaggcctggtgaagacgccttataaaccaccggtaaagcgtgaaccgatttcactcgaccgtttcattttattaaaaggaatgcctgcaggactcagcctgttgctactctccatcccttacggaatgaccaccaattatgtggccatgtatgcccgtgaaatagggattcatacacaaacaggtttcttttttacctttatggcgattggcatggccatttcccgtatattctcaggaaagctggtggaccggggaaaaataacccaagtaattgccgccggactctatctggtggtggtcagtttcttcctgctcgcatcctgtgtatatctgattcaatggaatgatgctgtctgcaccattctctttttcggaattgccctgctgatgggaatcggattcggaattatgtttccggcattcaataccctgttcgtgaacctcgcccccaataaccaacgggggacagctacttccacgtacctgacctcatgggatgtaggaatcggtatcggtatgttgaccggaggatatatagccgaagtctgttcgtttgacaaagcatatcttttcggtgcctgcctgacagtagtttccgctgtctatttcaaattaaaagtaacgcctcactaccataaaaacaagctacgatgagaaagaaagaacgttatgaaaaagtaatcgcatggtttcaggagaatgttcctgtagccgaaacagaattacattacaataatccgtatgaattactgatcgctgtaatcctttctgcacaatgtacggataaacgagtgaatatgatcactccgcctctctacagggatttcccgactccggaagctctcgctgccagtactccggaagttattttcgaatatatccggagcgtgtcttatccgaataataaagccaaacatctggtaggaatggctaaaatgctggttaatgacttcaacagcaaagtgcccgacaacatggatgatttgatcaaacttcccggtgtaggaagaaagaccgccaatgtgattcagtccgtcgttttcaacaaagcggcgatggcggttgacacccacgttttccgtgtcagtcaccgcatcggactggtgccggacagttgtacgactccattcagtgtagagaaagaactggtgaagaacattccggaaaaattgatacccatagcccatcactggcttattctgcacggtcgttatgtttgtcaggcacgtacgccgaaatgtgacacctgcggtttgcaaatgatgtgcaaatatttctgtaacacttataaagttacaaaagaggcaccaaaagccaagaataaataacgatttaatagcaaggaaccgaaataaatagtaactttgcggtcgatcaaaaaagagaatattaaaaacacttttaaataaaaatagagtattatgcagacaattgacaaattcaattttgccggtaaaaaggcatttgttcgcgtggacttcaatgtacccctggacgaaaacttcaacattacagatgacactcgtatgcgtgcagctcttcctactttgaagaagattttggctgacggcggtagcatcatcatcggttctcacctgggccgtccgaaaggcgttgccgacaaattctctttgaaacatatcatcaaacatctgtctgaactgctgggcgttgaagttcagtttgctaacgactgcatgggcgaagaagctgctgtaaaagccgctgctctgcaaccgggagaagttctgttgctcgaaaaccttcgcttctatgctgaggaagaaggcaaaccaagaggtttggctgaagatgctacagacgaagaaaaggctgctgcaaagaaggctgtcaaagaaagccagaaagaattcaccaagaaattggcttcttacgctgactgctacgtaaacgacgcattcggtacagctcaccgtgcacacgcttctacagctctgatcgctaaatacttcgacactgacaacaagatgttcggttacctgatggagaaagaagtaaaagctgttgataaagtattgaacgacatcaaacgtccgttcactgctatcatgggtggttctaaagtttcttctaaaatcgaaatcatcgaaaacctgttgaacaaggtagacaacctgatcatcgcaggtggtatgacttatacattcaccaaagcaatgggtggtaaaatcggtatctctatctgtgaggacgacaaacttgacctggctttggatctgatcaagaaagcaaaagaaaaaggtgtaaaccttgtactggctgttgacgctaagatcgctgacgctttctctaacgacgctaacactcagttctgcgctgttgacgaaattcctgacggatgggaaggtcttgacatcggtcctaagactgaagaaatcttcgctaacgtaatcaaagaatccaagactattctttggaacggtcctacaggtgtattcgaatttgaaaacttcactcacggttcacgtacagtaggtgaagctatcgttgaagcaactaagaacggtgcattctcacttgtgggtggtggcgactctgtagcttgtgttaacaagttcggtctggctagcggcgtatcttatgtttctacaggtggtggcgcattgctcgaagcaatcgaaggaaaagttcttccgggtatcgctgccattaatgaataatgaatttataacaatgtaattttagatacgagggcagttctttgtgaaaagagttgcccttatttatatctgacccatcaactaaggcatgaagagagtagcactcatattctgtatcctccttttcttcctttattcttgccaaagaaaaaaaggagaaagcgtctttctgccttcaacagaattacaaccactcacactgggaatgctcccgactctggacggactgccttttcacatagccaaagcgcaaggaatctacgattcgctggggttggacctgaccatcctttctttcaaatccgcctatgaccgcgacgcagcattccagtccaaatcactggatggcatgatcaccgactatctcagtgcagtaactcaacaggctatccaccataccgacttaggaatcatattgaaaaatgacggttatttctgttttatagtctccaaagaaagcggtatcaaccaacttcaggaactcaaagaaaaaaatatagctgtttcacgtaatacgattatcgagtatgcaaccggacagctactgaacaaagcgggaatcagtcaggcagaagtgaacaaaccggaaatcacccagctccctcttcgcctgcaaatgctgcaatacgatcagattgacgcatccttcctccccgaccctgccgcatccatcgcaatgaatgcccgccaccggtctctgatcagcacacaggaattgggaattgatttcaccgtcaccgctttctcccgagaagccatcaacgaaaaaagaagagaaatcgaactattaatcaccggatataacctgggaataaactatataaaaatgcacccgcaaaaagaatggaaacaggtattgatagagatcggcgttccggaaaacctgaccggcctcattgcactccctgtttacagaaaagcggagcgcccctcagccgatgccctggataaagctgtaacatggctgaaaacaaacaaccggatacctcagacatattccggatacaaaagtctgatagatacaacttttataaaaacaaattcaactactatcaaataacaactaatcatatgcgaaaaacactctttcgactctcaatgatcgcgttcgccctgcttggtatgcagagtacgctcaccgcacaggagaaaacaccgttgaatcaagtagtcaatacactgaaagaaagaatcagtctggccggttatgcacaactgggctatacatacgacgatgccgccgatcccgacaatacattcgacatcaaacggatcatcttcatggcacacggtaaaatcaccgacagatggacatgcgatttcatgtatgatttctacaacggcggtatgctgctcgaagtatatacagactaccggatcctttccggacttacagcacgtatcggagaattcaaagttccttataccattgaaaacgaactgtctcccactacggtggagctgatcaactgctattctcagtcagtctgttatctggcgggagtcagcggcagtgacaaatgttatggaatgacttccggacgagacatcggtatgatgattcacggaaaactatttcatgatctcctgcaatacaaatttgccgtcatgaacggacagggattaaacaccaaagacaaaaacagtcagaaagatgtagtcggcaacctgatggtgtatcctaacaaatggctgtctgtaggaggatctttcattcggggaaccggacacgccataggtgactcccaatattcgggaatcaaaacaggagaaaattacgccaagaaacgctggagcctgggaggggttgttaccacttccgcattcaacttccgtacggaatatcttgcaggaaaagacagaaacgtaaaaagcgaaggattctatgcgacaggcagcgtacgtttattacaaaatttcgactttatcgcctctttcgattatttcaatccgaacaaagcggcagatttcaaacaaaataattacattgccggactgcaatactggttttatcccagatgccgtgtgcaggcacaatacactttttgtgataaaaaaggagacggacaaaaggattctaatctgatacaagcacaggtgcaagtcagattctaactttttggcatcctttttgttctattacctataaataattgaaccattatgaatgaaaaaacgattaatgaacaatacacctatatacgctctctgcttgaagaaaaaagacttaaagaagctttgatgcagttggaatccctgctctggcaatgtccggactgggatttacgtacccgcttggagcagctgcaaacctcctacaagtatatgctggagtatatgcgccaaggcgcaaacgacccagaacgctggaatgtatacagaaaactcgtagctgatacctgggaaatagccgaccgttcgcgcctgcttatgctggacaatgcttcatcaagatattatcatgaggtacgccgcactccccgaccggaaagtctgtcagcatatacactcaaaaaattgctgcacatgctggagtcattcaatgacgacttggcagtcagcggactgctgtctgacgaaaagatggacgaggtactgaaacggcatgaagaaacacttaaatatatgtttctgcaaacatggaccaacagtgcatggactcccgaagaggaagaggatgcacaatccatgcttacctccgaacttcttccggtgaatgatctgtgcctgtttatcagtgctgtcacattaagtctgatggaatgttttgacctgcgtaaaatcatgtggttgctggatgcttaccgccatccggatgtcaatgccggtcaacgtgcactggtaggtgtcattttcattttccatatctacaggaaccgtctttcactctacaacgatctggtcaagagagtcgacctcatggatgagattcctccattcaaagaggatgtggcacgtatctatcgccaaatgctactatgccaggaaacggaaaagatagacaagaaaatgagagaggaaattattcctgaaatgttgaagaatgtttcgtccatgcggaacatgagattcggctttgaggagaatgaggatgagaacgatgacaagaatccggattgggcggacgctttcgaacaatcaggactgggagacaagttgcgcgaaatgaatgaactgcaactggaaggagccgacgtatacatgagtacatttgcggcactgaaaagttatccgttcttccgggaagtacagaattggttttacccgttcagcaagcagcaatccgatgtcatcaagcaactgaaacaggaaggtaacgagaaaaatacattgctggatttaattcttcaatcaggatttttcagtaacagtgataagtattcactcttctttacgatccggcagttgccaaaggcgcagcaagacatgatgctaagccagctcggtgaacagcaagtggcagagctgtccgaaaagtcgagtgcggaaacaatgaagaaattcaatgagcgaccgggaaccgtcagcaatcaatatctgcatgacctgtaccgtttcttcaaactcagtgtacgccgccatgagtttagggacatctttaaggagaaactcgatttacaccacattcctgcacttagtaacgtattatatagtgaagatatcctgttcccgatcgcagatttctatttaaagaaagaacgctggaatgaggcaatagaagtgtacgaggaaatggaaacgatcggagcacttcagggaagaggtgcggaatattatcagaaactgggatatgctctgcaaaaaaacaagaagtatgcagaagcgatcgatgcttatctgaaagcggatacactgaaaccggataacatctggaacaaccgccatctggctatctgttaccggttaaaccgaaattatcaggctgcattgagctattataaaaaggtggaagaagctacaccggaagataccaatgttattttccatatcggcagttgcctggccgaactcggacaatacgaagaagctgccaactactttttcaaactggatttcatcgaaagtaattgcataaaagcatggcgcggcatcgggtggtgttcattcatcagccggaaatacgaacaagccatgaaatattacgaaaaaatcattgaacagaagccactggctatcgactatatgaatgccggacacgtcgcatggacaatgggagacattcagaaagcggccgccctgtacggcaagtcaatcacagccaacggaaaccgtgaacgctttctggagatgtttcggaaagacaaggaagctcttctcaaacaaggtattcaagaagaggacatcccgttaatgctggatttattataacttcttcagctccccgtacagtttctgtatggggagtcccattatattataaaagctgcccgaaatagactttacccctatatatccgatccattcctgcactccatacgctcccgctttatccataggctgatatttgtccacataataccggatttcctcttcggacaaaacatcaaattccacatcggatgcagcagtaaagctcttttgccattcagtagtcgtaagacaaacaccggtgaacacctgatgtgacttaccggacaaagaacggagcatttcaaccgccccttctcgaccttccggttttccaagcactttaccatcgagccagacaatcgtatctgccgtaatcaacagttcccccggttgcataatactccggtaagcatccgccttttcgcgggagatatattccggaatcgcagcaccagccagatcggctggatatgattcgtccacatccggcaatgtcctgaccacataatccactcccaagcctgacatcagttctttccggcggggagaattggaggctaatataatctgatatttatctaaatttccaagcatagttttatttatcatttagtgatttacaactcaccagccgaaagcatcttccgccatccacttgccatgagctttcaatacttgttccaccacatcacgtccacagccacgaccgccatcgacataagatatatactttgcaaccgacttaacttccggaactgcatctttgggacaacaaggcaacccgcactcacgcatcacttctatatcaggcacatcatcgcccatatacagaatttcgtcatcagacagaccgtatttatcacggaaatcacggtaatcatgaattttcaccgcagaacccatatacagatccttcacacccaatgcagcaaagcggatacgtaccgcttctgtccgtccgccggtaatgatagcaatgtggagtcctttctttaccgccagctgaatggcataaccgtctttgatattcactgtacgcatcggttctccagaaggatgcaacgggactgttgtcgaactcaatactccgtcaacatcaaaagccagtgctttgatgcgggatagatcataattgatggtgctcatggatacttttactcattaatttataaatttcctgcaatgcctgactgtctgccagcatagaaagatgcttattcatcacattctcgtcatagcgtacagccggtccggtctgcgcatcacgaggagcgagttcatgcactttgcgtgccgtttcgtcaatcaggggaagcatgacatcaaatggcaaatgatatttttccagcaattcggcggcaagagcatacatatggttggtaaagttacaggtaaagacagctgccagatgaagactcctgcgttgctccgaatcggcttcgtacaccttatcagagagcgtaccggcaaccgctttcagcagctcggcatcttccggtctttttgcttcaataaagaaaggtacttcccgaaaatcaacttcacgttgtttgctgaacgtctgcatcggataaaatactccgtagcgttccgcatgaccttcccaaatattcatcgggatgctacctgccgtatgtaccagcagcgcatgctgcttcccatcagtgatctgaggcaacagttcgacgaaagcggcatctttcaatgaaataatatataatctcgcttcattcgatacgccttttaaatcagtgatatattccgcttccacttcattggctaacgtacgagccgattcttccgttcggctgtacacctgcatgatacggaatcctttccggtaaagcgctttcgccagattagttgccagatttccggcaccgagaaacacaacgggcgtatcttcaatacttcttttcattgtttctttaacgttttgaaacccaaaataaaataattccgatgatcaacagtgccaatggcaacagataaccggacaaggaaccgagcaatgacattaccagaccgatattcattaccagccacagtcccaacagcacaaagccgaccgacttgtcacgcttgaaaataagaaaactgatagaggcatacaacaacaaattgtccttattcatcacccaaggcaaacctatagaagcaaaggggagcagtttatttatcaggaaaagagttccgataacaataaaagcgacggcagtagccttataagtatctttattattatttgctttgacagctcccatcgttattttcctccgaacttattaatatgaattttctcccactggaggtgttcttcgttgaaaggcttacgttccattcccttatgtccgatggcaatcacggaaagaatctgtagttgcaaaggaatatccaaaattccatgaacaaactcgtcagacggcattccggttgcagtgaaacgttcgcgaacctgtacccaacagcttcccagccccaaatcttccgcctgcaactgtatcatgatggaagcaatagaagcatcttcaatccagacatcgctcgccaatggatctgccatcacgacaatcgccaaagcagcgtctgcaatgaaagaagaagcctgttctttgcagtgagacagttctttcaacttttctttatcatcgactaccacaaactgccagctattactacgtttggaactgggagacattaaggcagctttcatcagtgccacaacctcatcctgtgttaactcctcatccgtaaatttgcgcatactgcggcgattctttatcagttcactgaaattttccatattatttccgttttcatttgatttatgtatgcaaagatagcgcaaaccgatcgtaataagaaatgaaattgtatctttgcactgagaaatatattcattatgaaaaaacgaattacacaagacgattacatcaaagcgaatcgtaaagccagccgtgaggcagaaatcaaagagcacggacaccccgtttgttacaaacgagtgcatgagtcaaagaaagtatataaccgcagaaagataaaggcagccgataaaaagctgccttatttttttcatttgggatagtgtcggtatcccaatgacatagtgacaccatgagacagtgatagtgacactatcctgttgcgatagtgacaccatgttttatgcagttcctgataggcagaaagggcgatttcctatacaattcgcgtcagttctccagtagtggagtctatgataaacccgtgcactttcacgtccgacggaatcaaaggatgatgaactataaaatcgaccgttccccttaccgacttctccgtatcttcaaagccatctagccaagaatgaaaatcgactccacaaaaactcatcatatgaatataatcggcattaataccccgtgccttcatcttctcaagcatttcttcactgtgcatatggcaggctccacaatcagaatgggcaatcaccattatttcctccacacctaactcgaagatagcgacaagcagactgcgaatcacactaccgaaaggatgggaaatgacgcctcctgcattcttgatcattttaacgtctccgttcttaatgcctagtgcggccgggagtaaagctgtcaggcgtgtatccatacaggataagatagcaatctttttatcgggatacttattcgttatatattctttatatccctcgttcttaacgaactctctattataagcaagcatttcttctatcatagcgctattttgtttggacacacaaaaataaagaaaataataaaaagctgtatcaggaaacaatgaaaatataccggaaatcctttttaaacttttacgcaggatacaggtatggaaacaaagagccggacaagagaaatctcctgcccggctcctattaattatgcttgattattaattaactgattaataaccggcgttttgtccgaattctgccggattgttgatcgcatccagatatttcgtaggaataggacgcaaatagaattctttcttaaagtgctcggcagcacgcttattataagcagccaaacgagtctcaaaagcagcattacgtttcagcaaataccagcggccacattcgccacaaagttcacgggcatattcatcgaaaacataattcagatccacttgcgactcactgaccgtaccggcaccggcacgcgtacggagtacattaatatatttggcagcatctcccttgttcaagcgtaccgatgcttcagcagcaatcaggtaaacttccgccatacgcatgatcatcacatccacagtttttctctgaacgtctctgccgacaaacttattacccggcatattgaatttagaaagagccggataaatagataaccacaaagcactggcagcactaggtttgtcataggtagccctggcagttccattctcatcgtaaagatcgaaaacattaagaaccaaccccggatattgagctttttcctcttctgtcagcgtcttcaaagaacaataaacggcatattgatgagcttctgccggatctaaaggcatagcaggatgaagaatattaccatctgttttatcctgagtagtcttcgctgttccatctgcattccagatagccagctggcagtaattagcatcggctgtactattggattccaagttaaaatgaggataaactttcttacctatattagatgcgggaataccaaatttagtagcaagtgtgcttgtgatttctttggcacacgctgaacctccatattcataagtcgccccccatgccggtatagaataagacgagtaagctgagataaatgaataacgaaaacgagagtcgttcatatcagcagcaaaacagtccatcagatatttggatggcaggaagatattactgttcggacgaccgtaaacgaagtttgaagtcttgtctaccaaacccaggtccgtatatgttcccaacgaaggtaagaagtgacggaacatttcactttgtgagtagttaccattggtgtaagcgtccgaatttctttcggcacccgcagcaatgaacagagcttcttcattgttacgattattattttcgttgaatacatcggcaaaagcaggatgcatataccactcataaatcgctttattattaatcatggttgtcgccgtatcataggctttttccagaaagctgacaccatcggtatctttcagatcataaccggcaccattaatatatgcacgtgccaataatcccatcgccgatttctttgtaacgcggctgtagtaatcactgaaacttacgggcagattctctacggcaaacttcaggtcttcgataatggcagcataaatttcgggaacggtagaacggtgagcatcaaaagaaatattctcgctatcggcagccttcaactgcaaatcgacatttccaaactgctccaccagattcatataatagtaagcacgcagacatctggcctgtgccacacattcattgatttcattctcatcccctgtcacattctcagctccgtcaatcacaatattacagctgttgatacacagataagaatattgccacactttataataatagctatcatcggttttcataccgttataactatgataacgctgatagctggagcccgatttaggttcttcccaaatatcagtacccgcttccgtacaaaccagatagtcactactctgatagatgttgttgatcaaggctgtatagcacgagttggtgaatgccttataagtttccaatgtataagaaccatcggagaactgacccgagttgttggggttcacttcatcaagactgcaagagccccaagaaaaaacaccggcaacaagtagaactaaactatatatctttttcatattgctattttttagaaagttaaattaagaccaaatatgcaatcacgagacaatgggaagttgatgcttccgttcatttccggatcgtaattcttcacatatttgtttggcgaataagtaaacaggttggtcattgtcgcataaactctcagattactgataccaaaacgttttgtaagtttaccgggtaacgtataacccaatgttacgtttttaagtttaaagaatgatccatccacataatacatcgaatcatatccttcataagcacttctatccttggatttatcgatagcatagaacaagacatcctgatctgcttcgatcgtcttgtcatagtaagtaaaataagtaggaatattgtaatccggattaggcgaatatttacctatcacactaccatagttcatcatttgcccccaacgtgcataaaggaagacagacaaatcaaaatctttgtatctgaaattattcttaaagcccaatgtccagtccggagtattacgacctattacctgacgatcataatccgcacgtacaccataaggattttctgccgtaatatcaacgcgctctccttcaggattcatataataataaccatttccgtccttcttcacactaggtaaatccagcttaatatcgcccggttcgcatccgaacaaagcagcagtttccttttcgctatattgccagatacccaacactttatatctatagaaagaaccgactccttcgccgactttgaacaccatatcacccttttttgcattgaacatcatatcctgcccttcgatcaaagatttaattttttctttgttggcggtaaatgtcactgttgagctccaagtaaaatctttcttcacaatattacgagtattaagagcaagttcaataccgcgattttctgtttcagcagcattcttgttcattttataagtagtgctacctgtgtaattacccataatagatgtcggcaatgcctgagaaagaattacatccgttgtttttgtccgatacaaatccaccgtcagatcaatacgattattgaggaagctggcgtcaataccaatattcaagtcatgagtcttttcccatgtcagattacggttagtgatatactccgtaaacttggctgacggaacagtcattcctcccaaagaggttgtcacattttccaaagatgccatagaactgtattcagcaataccggcagtagttccggcaacaccatagcctacacgcagtttcaagttatccaaccagctttttgtaccaggcataaatgcttcatccgagattctccagcctacagaaactgccgggaataaattccatctattgtctttcgacaaacgggaatccgcttcataacgactggaagcagagaacaggtatttacctttgtatgagtagttgacacgaccgataaagcccatccctttcgacatcagatatttgctgttcagtttcttattatcagcattctgcaatgcataccacaacatatcattggtcgccgggttttcaccatagacataatattcttcactctgattgtaattccaggaagtaacccctgtaaccgtcaggtcatgatccttattaaatgtattgtgataagttactatgttttcccatttgtaattatatcctgtcttattggtagcttcgccatatgccaccgtactgcctttcaacacattataagagccttctcccataaatttaccggcacgagattgagaataactgcctccaagctgtgacttgacagacaatccttttaccggtttccattcaagataagcgtcaacataagcccttcctgctttagtattattcttatatactccatcttgttcgtctgctaacggatttggatctgatgatgaaccgggaatcggaaattccgtaatagagccatcttcattataaggagtacctaacggggtggcaaacaatgctctttccaaaacggcattacgtgaattcttgttggagaaagatgcctgaacattaataccggcattcatccatttattgatttcctgatctatacggacacgggtagagtacactttatagtcatcattctcatacatactcttctcatcagtatagttcaacgagaaataggctttcgtcttctcagtacctccggcaacggaaatactataattctgcttcaaacctgagtgtaatacttcatctccccagtttacccattggttgtttttgatggcatcgtatctttcaccgaaaatttcctcctcattagtagtaccgacaggcttataagaatcttttatataattaatgtatgagtcacccgtacgcatcttaggaactcgggcacccatagtcgttccggcataagcattaaaattgatgaccggttttccactcttggatcctttcgtagtcacgataataacaccattcgcaccacttgaaccgtagatagccgtagaagatgcatctttcagtacttcgatagattcaatatcattgggattcaaggtagcaatatcacccggcataccatcgataatataagtcggcttaaatgcatctgaagagatattaccatcctcatccaactgtaaagagcgggtaccacgcaactgaactgtcggtgacgaacctgcctgacctgaagaattagtgatatccagacctgcaattttaccttgcagcgcatccatcggattcacgcccggattcatggtgatatcctctgatttcacagaagcaaccgcacctgtcaaatcacgtttctttaccgtaccgtaaccgatgaccactacctcatccaaagcctgtgtatccggaaccatctttatattcagcggggcatttccgctcacaatgatagcctgttctttatatccgatataagaaacaaccagttctttacttccgcccggaagattaatggagaacttaccgtcaaaatcagttatcgtacctgtacttgtacctttcaccacaatagaaacaccgatcaacggttctccattttcatctaaaacagttcctttcactgtctttgtctgcatgacggcttgcacagtaatatcattcacaccattttctgcataaacagatatggcagaaggggcacacaataaagtcagccctaaaatcatggaaacgcgtctatgctgtgtcttccacgcttcaacaaatgcattctctctcattcgttttaatttaaagttaatattaattttcctttgtttagtaaaatacaattagcataatcttttacatagacgtttccattttacttctgtactcacaaaggacgacaataatacaaaaattcgcttttccaagcctttttttcctcaaatatatgcaaaggataaaaagacaaattttaggctaagccaacaaattctcttttttattgttgaatgaagaataaaaagtgtaaatttgtatttggatgccacttaaactaacaacatattatcgcggaaaagacattcctgatttaccgggaaccaatacttttcattccaaggagttgtttcagatctatgaatcgactccgggatataccccgctactgatagtggcaacagaagaaggcagacctgtagcacgcctgcttgccgccatacgcaagaccaaaaagtggcttccctcctctcttgtcaaacaatgtgtggtatatggtgcaggtgaatttctggacacttctctaccggcaagtaaagagaaggaggaagaaattttcggtgaaatgctggagcatctcacacaagaagcatcacgcacctgcattcttattgaattccgcaatctggataattccatgttcggttaccgtttcttccgaaagaacgacttttttccggtcaactggctgcgtgtccgtaactctctgcatagtacgcagaaagcggaagaccgtttcagcccgtcacgtatccgtcagatccggaaaggactcaaaaacggagccaaagtagtagaagcccatacggtggaagagattaaggaattctcgcggatgctgcacaaagtttattcttcacgaatacggagatatttccctgccaatgactttttccgccacatgaacagcatgcttatcagaggaaaacaggcaaaaatattcatcgtaaaatacaaggaaaagattatcggcggctccgtctgcatctattccggcgaaaatgcttttatctggttttcaggaggaatgcgaaagacgtatgcactgcagtcacccggcatactggcagtatggaaagcacttgaagatgcccatgaacggggattccgtcacatggagttcatggatgtaggacttcccttccgcaaacatggttatcgtgatttcgtactccgtttcggaggcaaacaaagcagtacccgccgttggttccgtatcagctggccatggctgaataatcttctggtcaagttttatgtctaaatgtaatctcaagattacaaaacccgtctttgtcacccatccggagcattttttatgctttattccccaataattaaatgcagaaatatttctttattagacaagaaatgtctttctttgtgctgttttatgccatataagcacataattaaaccatataaaaaaatatagttatgaagatttcacacattgagcatctgggcattgctgtaaaaagcatcgaagaagcccttccttactacgaaaacgtattgggtctgaaatgttacaacatcgaaacagtagaagatcaaaaagtaagaaccgcttttttaaaggtaggtgaaacaaaaatcgaattgttggagccgacttgccccgaaagcaccattgctaaatttattgaaaacaaaggtgcaggtgttcatcacgtagcatttgccgtagaagatggcgtagctaatgctttggcagaagcagaaagcaaagaaatccgtctgattgacaaggctccccgcaaaggtgccgaaggtctgaacatcgctttccttcacccgaaatcaacactgggtgtgctgacagaactctgcgaacactaatcataaactctaaaaaaacaacaagaactcatgagtaatcaacttgaaaaaattaaagagcttattgaacgccgtgccgttgcacgcatcggaggcggcgaaaaagcaattgcgaagcaacatgaaaaagggaaatacacagcgcgtgagcgtatagccatgctgttggatgaaggtagcttcgaagaaatggacatgttcgttgagcacagatgcacgaacttcggcatggagaaaaagcactatccgggtgatggtgtagtaaccggttgcggtactatcgaaggtcgtctcgtatatctttttgcacaggactttaccgttactgcaggttcactgtcggaaacaatgtcactgaagatctgtaagattatggatcaggcaatgaagatgggtgctccttgtatcggtatcaatgactcgggcggtgcacgtatccaggaaggtattaacgctttggcaggttacgcagaaatcttccagcgcaatatcctcgcttcgggtgtcattccgcagatttccggtatcttcggtccttgtgccggcggtgctgtttattctccggcactgacagacttcacactgatgatggaaggtacttcttatatgttccttacaggtccgaaagtagtgaaaactgtaaccggtgaagacgtaagccaggaaaacctcggcggagcaagcgttcactctaccaaatcgggtgttactcatttcactgccaaaacagaagaagaaggtctggcattgatccgcacacttctgagctatattcctcaaaacaacctcgaagaagctccatacgtggattgcacagatccgatcgaccgtctggaagattctctgaacgatattatccccgacagccccaacaaaccgtatgatatgtacgaggttatcagcgctatcgtggacaacggtgaattcctggaaatccagaaagactatgccaagaatatcattatcggttttgcccgtttcaacggtcagtctgtaggtattgtagccaatcagcctaaattccttgccggtgtactcgacagcaacgcatctcgcaaaggcgcacgtttcgttcgtttctgcgatgctttcaatatccctatcgtgtcgttggtagacgtaccgggattccttccgggaacaggccaggaatacaatggcgttatccttcatggtgccaaactgctgtatgcttacggtgaagctactgtacctaaagtaacaatcacattgcgtaaatcttacggtggttctcacatcgtgatgagttgtaaacaacttcgtggtgacatgaactatgcttggccaacagctgaaatcgctgtaatgggtggtgcaggtgcagtagaagtattgtacgcgcgtgaagccaaagaccaggaaaatccggctcagttccttgccgaaaaagaagcagaatatacaaaactgtttgccaatccttataatgcagctaagtatggttacatcgatgatgtcatcgaaccccgtaacacacgtttccgcgtgatccgtgctttgcagcagttgcagactaagaaactgtctaacccggcgaagaaacatggtaatattccgttgtaatccaacttttcacattaaaacaagaacgattatgaacaaaaccaaaatcggaatattcctttctctgctgttgctgattggattgacttcctgcggagagcaaaagtcgaacaataagctattgctgaatgaagtcctgatagacaatcaaaacaactttcaggatgactacggcttgcacagtgcatggattgaaatattcaacaaatcatacggtagcgcagacttagcagcttgtttattgaaagtaagcagccagccgggcgatacagtaacttattttatcccgaaaggtgacatacttacattagtaaagccacgccaacatgcgttattttgggcagacggcgaacctaatcgtggtaccttccataccagcttcaaactgaatcccgaaacagccaattgggtcggtctttttgattcaggcagaaagctacttgatcaagttgtcataccagcaggaactttaggtcccaaccagtcttatgcacgcataagcgacggagcagcagactgggaagtaaaaggcggaagcaaagacaaatacgtaaccccgagcacgaacaacaaaacccttgacagtaatgccaagatggaaaagttcgaagaacatgactcagtcggtatcggtatgtctatttcagccatgagcgtagtattctgcggattgattcttctcttcattgccttcaaggtggtaggtaaagttgctgtcaacctgagcaaacgcaatgcgatgaaggctaaaggcatcgataaagtcgaagcgaaagagctttcacaggctccgggtgaagtttatgctgctatttcaatggcattacacgaaatgcaggatgaggtacacgacgtagaagaaacggtgctgaccatcactcgtgtgaagcgcagttattcaccgtggagttcgaagatttacaccttgcgtgaaaatcctaacagaaagtaaatcattccctaaaaagataaaacgatgaaagaatataaatataaaatcaacggtaactcatacaaagtaaccatcggagatattgaagataatatcgctcatgtagaagtgaacggtacgcattacaaagtagaaatggagaaacaaccgaaagctactcccaaaccggcagtagtacgccctatgcctaactcaccggctgctcctaccacaccggtagtaaaaccggctgctccttctaccggcaaatcaggcgttaagtccccactgccaggcgttatccttgacatcaaagtaaatgtaggtgatacagtgaaaagaggacagactatcattatattggaagccatgaagatggaaaacaatatcaatgcagacaaagacggtaaagtgactgccatcaatgtcaacaagggagattctgttcttgaaggtaatgacctcgtaattattgaataatatgggagattttattaactttttaggaaataaccttgccgatttctggacctacacgggatttgccaacgcgacaggtggacatattgctatgatcattatcggtttaggctttatttacttagctgtagccaaagagttcgagccgatgttgttaattcctatcggattcggtattctgatcggtaatatacctttcaatatggacgccggactaaaagtcggtatatatgaagaaggttctgtattgaacatattgtatcagggagtaacgtccggctggtatccaccgctcatcttcttaggtatcggtgccatgacagacttctcggcgctaatctccaatccgaagctgatgctgatcggtgcggctgcccagtttggtatcttcggtgcatacatgatcgcattggaaatgggatttgacccgatgcaggccggtgctatcggtatcatcggtggagcagatggtccgacggctatcttcctttcgtccaagctggcacctaacttaatgggagccattgcggtatccgcctactcctatatggcgttagttccggtgatacagccgcctatcatgcgtctgctcaccaccaaacacgaacgcgttatccgtatgaaaccgccacgtgccgtttctcatacagagaaagtgattttcccgattatcggtctgttgctgacctgcttcctggttccttccggtctgcctctgctgggtatgctgttcttcggtaacctgttgaaagaaagtggtgtaacccgtcgtctggctaacacagccagcggtccgctgattgacgttatcactatcctgttaggtttgacagtaggtgcctctactcaggcttccgagttcctgacactcgactccatcaagatctttgccctcggtgcactgtcatttatcattgctaccgcatcaggtgtgatcttcgttaagatcttcaacctcttcctcaagaagggcaataagatcaatccgttgatcggtaatgcaggtgtatctgccgttcccgactctgcacgtatctcacaagttgtcggtctggaatatgatcctaccaactacttgctgatgcacgctatgggtccgaacgtagcaggtgtaatcggttcggctgttgctgccggtatcctgttaggattcttaatgtagggacaaaatattaggtgcggatattgctgttttagatgcaatatccgcacttatcattatgttatcttctcttatcattccgttaatctattccaaaaaggctacgaataattcgtaaatacgatattttttagcatcttgcgtctttgttacgacacactaaaataaatatttatgaaacggattattctcctcgccttcctttgtaccaccaccctggtgatggcgcagcgcatcaatcatgttcaggaagcaatagcaaactacgattacgaggcagctctcactctcattgccaaagaaaagccgacaattcccctactcttgcaaaaaggtaaagcacaacggggacttgggatgaatacagaagcactttccacttatcaggaaatcatagccaatgatactgccaatacccgtgcatatatcgaagcagccgaatgctgccgttcattggccaaataccaacaggcactgaaatattatgaacaggcacttgatctgaatccggaaaacaaatatgtgcgtattcaatacatcggactactgctctctttacagaagtttcaggatgctttaggagaaagtagtctgatgacagagaaagacagttccgccatcgccttgcatctgcaggcccaaagtttcgaaggtatgggagagcttctccccgccacggggtgctactataatatacaggagaaataccccgacgactatcttgccgccgccaagctcgccgcactgaacatagccggttcttatttcaacgaagcaattgaagccacggagaaatatcggcagactgataccaccaatatcgctgtcaaccgtcagaatgcactggcatattgtctgaataaggattatcctaccgctatccagcgttatgaatacctggtgagccagggcgacagttcttttcatacctgttattatctgggtatcagctattatgcggaagagaaatattacgaagcacatgactttctggaagccgcccgaaaacatgatcctgaaaacgtaaacctgctttattatctcggccgtgcctgcgccaagacttcatggaagaagttaggcgtagagtatctcgaaaaagcgcttgatctgactattcccaaagacagtaatatggtacggctctatattggcatgaccgactgctacaaaatggcacagatgcctaaagagcagattgaatcgatcagagaacgctaccggaaatacgataaacaaaatcataagctgctctatgatatggctttcatttatttctattcgctgaaagacaagaaaaacaccgaacgctgtctggaagcattcttaaaaacacgcccgaaagaagataaggaagaagaagcgaaactaaacgaacgaggcgaactcgttttaggcactaagaattattataatgctgcagccaactggctgaaagacattcaaagtaagcaaaagatagaagatttcttcttgggaggaaatgtgcccgctcagaaaccggaataagcagataaaggatattacgtaaaaaaggctgcaaccgtcaaacgattgcagcctttctatataataggataatctgtgattattcagccaatttgttgtctgaacccagcacattaaggattttgtgcttgtacagtttttccatgttgtcacgagccggaccaagatacttacgtgggtcgaattcagctggtttttcagcgaaagtcttacggatagcagcagtcatagccagacgagagtctgagtcgatgttgattttgcaaacagcagacttggcagctttacgcaattcttcttcaggaataccgatagcagctttcagagcaccaccaaacttgttgattgtttcaacttcttcttcaggaactgaagatgatccgtgaagtacgatagggaatcccggaagtttttccattacagcatccaatacttcgaaagccaatggaggaggaaccatacgaccggtagccggatcgatgtggcactgttccggagtaaacttgtaagcaccgtgagaagtaccgatagagatagccaatgagtcacaacctgtacgagtagcgaaatcgattacttcttcagggtcagtgtatgtgtggtggtcagaagaaacttcatcttctacacctgccaatacaccaagttcaccttcaactgttacgtcgaactgatgagcgtattcaaccaccttcttagtcaaagcaacgttttcttcgtaaggaagatgagaaccatcgatcataactgaagagaaacctgaatcgatgcaagatttgcaagtttcaaaagtatctccgtggtcaaggtgaagaacgatttcaggatgtgcgcaacctaattcttttgcgtactctacagcaccctgagccatgtaacgcaacaaagtagcgttagcatactgacgagcacctttagaaacctgaagaatcaccggagattttgtttctactgcagccttgatgatagcctgcatctgttccatattgttgaagttgaatgctgggatagcgtatccacccttaatagccttagcaaacatgtctcttgtgtttaccaatcctaagtctttgtaattaaccattttgtttaaagtttattgttagtgaattaaaattctacgcaaaagtaagcattatccaccgaataacgagcatcggaaagaaaaatataatagaaaaaggtttaaatcgatcagcaaatattcatccgtaagcgggtctgacattagattgtaatgtccacctagcaaataaacggctgaaaggttctatcccaaaacaggtattataccataaaaagcacaagacattcttttcgtgccaatcatataattcatagaaatagcataattcacagaagttttttcagcaaagttttttctattccggagaaatgtgctatctttgcgctctgaaaatgaccattacactatttcttaccaaaatagtaacagaatataaattaaaaaaacagatactgaaatgaaaaaaggccttcatccagaatcataccgtccggtagtattcaaagatatgtcaaatggtgatatgtttttgtctaaatcaactgtagcaactaaagaaaccatcgaattcgaaggtgaaacttatccgttgctgaagattgaaatctctaacacttctcacccgttctatacaggtaaatctacattggtagatactgcaggtcgcgttgataagttcatgagccgttacggtgaccgtaagaagaaataattcaatctttcgttaagatgaaaaaagaggagatttccggttggaaatttcctctttttcgtttcatagataaactaaaggaccgcaccattcttcacagagtagtgcggtccgtatattaactggctaaggggaactattaccaggtaatataaaaatggtatagttaagggaatataccataccattatattgtctgatctcctgaaaaatgatggtttattaaatagtactattcaggagaaatacttcctattatatataataatattcagcaggcaaaaaagacggtcctgctgacccgttgcactacatattacagtccacgagggatgagatacagtgggcgcattaacgctccacacgggggacagaaccgtatatctaaggaagccacgagcatattcccacatgctcgtagcttaaattcgagaattaaattctcatatcgcattccgcgactgtaatactagtgcggtgcaaaagtgggaataatctctgataaaatcaacagaaaaggcattttttatctataaacaatcattttcctttaatgttgatactaatttcacatttctaatatacccgtctctactgaacatagtcaagtatcaaattgtttacttcccaaacaatgaacgacttatgaaaaatatctatgtgattgcactcgcagccatcctatttcaaggctgcgggcaaaaaaaagagatgacggcacccgccacccgacctgttaagacaactattgtcgaatcaaggtcagtaatcagaaaagacttctccggcattgtagaagcagtggagtatgtcaaactggcattccgcgtcagcggacagatcatcagcctgcctgttatcgaaggagagaaagtgaaaaaagggcaactgattgcagctatcgatcccagagatatcgcattgcagtatgctgccaccaagtcttcctacgaaacggcttccgcacaagtggaacgcaacaagcgcctgctctcccggcaagcgatctccgtgcaggagtatgaaatcagcctttccaattatcagaaagcaaaatcggagtacgaactgtccagcaacaacatgcgtgacaccaaactgacggcccctttcgacggttctatcgagaagcggctggtggagaactaccagcgtgtcaattcaggagaaggaatcgtacaactggtcaacacacagaacctgcgtatcaagttcaccataccggatgcatatctttatctcctccgtgccaaagatccccgtttccttgtagagtttgataccttcaagggccatgtgttcaaggcgagactggaggaatatctggacatatccaccgaaggaacgggtattccggtcagcatcactatcgacgacccttcattcgaccgggacttatatgccgtgaagcccggcttcacttgcagcatccgtttcacagccgatgtaggcccactggtgcaggatagctggacaatcatcccgctcagtgctgttttcggcgaaagtgacggaaacaacatgtatgtctgggtagtagaggacaacaaagtgcacaaacgcaaaatcgtcgtcaatgcccccacaggagaggcgcaagtactcgtgtccgaaggactgaaacccggagaacaaatcgtcatagcaggagtataccagttggtagaaggagaaagtattaaatcaatagacaaatgaacttagcaaaatattcactggataacacgaagatcatctatttcttccttgccgtactgctgattggaggtattacctccttcggaaagctgggcaagaaagaagatgcccccttcgttatcaaatcagcggtcatcatgacacgctatccgggagccgaaccggcagaagtagaacggctgatcacagagcctatctcccgtgagatacaaagtatgagcggcgtgtacaagataaaatcagagtccatgtacgggctctccaaaatcacgttcgaactgcaaccctcactttccgccagttccatccctcagaaatgggacgaactgcgacgcaaagtgctcaatattcagccgcagctgcccagcggtgcttccaccccgaccgtctccgatgatttcggcgacgtattcggcatttattacggactgacggcagatgacggcttcacttatgaggaaatgcgtaactgggcggaaaggatcaagacgcaggttgtcacagcagacggcgtgatgaaagtagcactgttcggcgtacagacggaagtagtcaacatcttcgtttctaccaacaaactggtgggaatgggaatcgatcccaaacagctggccaaccttctgcaatcgcagaaccagattatcaacaccggagaaatccgtgcaggcgtacagcagttacgggtaacagccaacggaatgtatgccaacatagacgatatccgcaaccaggtaatcaccaccaaagccggacaggtgaaactgggcgacatagccgtgatcgagaaaggttatctcgaccctccatccaacatcatgcatgtgaacgggaaacgggctatcggcatcggtgtttccaccgacccgcaaagagatgtagtgcagacgggtgagaacgtaaaagtaaaactgaacgagctcctccccctcatgcctgtgggactggaactgcaaagcctctacctcgaaaacgagatcgccaacgaagccaacaacggatttatcatcaacctgatcgaatccatcctgatcgtgattgtcattatcatgctggtgatgggactccgtgccggtctgctcatcggctcttcgctgattttctctatcggaggtacactgctcatcatgtctttcttcggcgtcggactcaacagaacgtccctggcaggatttatcatcgccatgggtatgctggtggacaacgccatcgtagtgacggacaacgcccaaatagccattgcccgaggtataaaccgacggaaagccctgatagacggagcaaccggaccacaatggggcttgctcggagcaactttcattgccatctgctccttcctgccgctttaccttgctccctctgctgtagcggaaatcgtaaaaccgctgtttgtggtacttgccatttcactaggactgagctgggtacttgccctgacgcagactaccgtattcggaaatttcattctgaaagccaaaacaggcgacagcacgaaagatccatacgacaagccgttctatcataagttcgcttccgttctcggagtattgatccgcaagaaagcagtgacactggtatccatggtgatcctcttcatcatctcgctcattattatgggaacgatgccgcagaacttcttcccgtcgctcgataagccttatttccgggcggatgtattctatccggacggatacagcatcaatgacgtagtgaaagagatgaaatcggtagaagagcacctggcgaagcagccggaagtaaaaaaggtatccatcacattcggcagcaccccgctaaggtattaccttgcctccacttccgtaggtccgaaaccgaattttgccaatgtactcgtcgaactgacagacagtaaatatacgaaagaatacgaagaagattttgacggatatatgaaagccaattatccgagtgcaatcacacggaccagcttgttcaaactgtcccccgcagtggatgcggctatcgaaatcggctttatcggtccgaatgtggatacgcttgtatcacttaccaatcaggcaatagccattatgcaccagaatccggatttaattaatatccgcaattcgtggggaaacaagatacccgtctggaaaccggtttacagcccggaacgggcacaaccgctgggtgtatcccgacagggaatggcacagagcattcagatcggtaccacgggaatgactttgggagaataccggcagggagatcaggtacttcctatcctattgaaaaataaccagctggattcattccggatcaatgatctgcgcacactgcccgtattcgggacaggcaacgagacgaccagcctggaacaggtagtatctgaatttgacttccagtaccggttctcgaacgtgaaagactataaccggcagatggtgatgatggcacaatgcgacccgcgtcgcggaaccaatgcgatttccgctttcaaccaggtatggtcgcaagtacagcaagagataaaaataccggaaggatataccatgaagtatttcggtgaacaggaaagtcaggtggaatcgaatgaagcgctggccaaaaacttaccgctgacattcttcctgatgtttgtgacgctgctcttcttgttcaagacgtatcgcaagccgaccgtcatcctgttaatgctgccgctgatcttcatcggtatcgtgttgggactgctcgtactcggcaagtcgttcgacttcttctccatattgggtctgctaggtctgattggtatgaacatcaagaacgctatcgtactggtagaccaaatcgatttggaaacagcagcaggcaaaaaaccgctggacgcagtcatcagtgccacgaccagtcgcatcattccggtagcgatggcctccggaacaacgattctgggtatgttgccgctactgttcgacgccatgttcggcggaatggccgccaccatcatgggcggactgttagtagcctcggcattgacactattcgtccttcctgtagcctattgcgccatccaccggatcaaaggagaacaataaccatcaactgacaattgtcaattgtcaactgtcaattgtcaactaaaaagattatccatgaaagaaatgaaaacccaactcatactattttcactgttgctccttggctccacagcctgggcgcaacagccctgcctgagtcaggacgcctaccgcgaaaaagtggaggcttacagccagatattgaaacaacaaaaactaaagacattggccagttcggaggcgcgaaagatagcccatacaggtttcctgccgaaaatcgacgtaaatgcagacggtaccctgaacatgagcgaccttagcgcatggaacgaaccggtgggcgaataccgcaaccatacctaccagggagtatttgtcgtatcacagccactctacacaggcggtgcgctcaatgcccaacatcagatagcgaaggcagacgaaaagctgaaccaactgaacgaggaactcacgttagaccagattcactatcaaagtgatgctgtctactggaatgcctccgcttcaaaagccatgctacaagcggccgacaaataccagagcattgtcaaacagcaatatgacattattcaggaccgtttcgatgacggaatgatcagccgtacagatcttctgatgatttccacccggctgaaagaagcggaactgcagtatatcaaagcccgccagaattatacattagcgctgcaacaactgaatattctgatgggagaagcaccgaatactcctgtagacagcctgtacaacatcggaatgatctccgctcctgtccggatactgcctctggaagatgttttgcaacgacgtgccgattatgccagtacggaagtaaacatcatgaagagccaggcacaacgtaaagcggctctcagccagttcaatccccaattaaacatgtatttcagcggtggctgggcaacggccacacccaacttgggatacgacgtatctttcaatcccatcgtaggagtcaatctgaatattcccattttccgctggggagcccgtttcaagacgaaccggcagcagaaggcatatatcggaatacaaaagttgcaacagagttatatgacggacaatatcaacgaagaactgtcggcagctctcaccaaactgacggaaacagaatctcaggtgaaaacagcgaaagaaaacatgagtctggcaaatgagaatctggatctggccactttctcctacaatgaaggaaaagcgagcatggtagatgtactttccgcccagttgtcatggacgcaagcacacaccaatctgatcaatgcttatctggcagagaagatggctgtggctgaatacaagaaggtgaccagcgaatagataaaaacaaaattaggcacggatgacacggatttcacggttttaagagttgagtaactaaaaaccgtgtttatccgcgtaatccgtgcctaatctttattggttgttctttttattatgcaaggaaggagatcagtacacctgcagctactgccgagccgattacccctgagatgttacttgccatacaatactgcaatacatgattcttcggatcgtatttcaacgcaatctcattcgccacacggcttgccatcggaacggcactcagtccggtcgctccgatcagcggattaatcttcttcttggagaatagattcactaacttcacaaagaagataccaccggtaatagaaagagcaaatgcaaggaaaccaccgatgacaataccgattgtcgtccagttcaagaaggcttcagccgtcatggttgcacctaccgaaagtccgaggaagatagtagcagcattcatgatactgttggaagcagcgtcgaacagacggaaagtattgcttccgatttctttcaccagattaccgaacatcagcataccgatcaaaggtactgcacttgggacgaagagagctacaatcgtagtcactacaatcgggaaaataatcttcagtacacgcagattcttgatttccgtcttcgaaggatatttcttttcctgttccttcatgttgatgctcagttctttcttagtacagaacagcttcactaccaacggaatgatcacaggcaccagtgccatataagaataagcggcaatagcgatcggacccagcaaatgcggagccagcttgatcgttgtaaagatggctgtcggtccgtccgcaccaccgataatacccagtgaagcagcttcttgcggagtgaatcccatcaggatggctaccaacagaacagtaaagatacctaactgtgcagcagctccaaagatggaaagatgcagattacgcaacatcggtccgaagtccgtcaacgcaccgacccccataaagatgatcggaggcaggaaaccggtcttgatcagcatataatagatgaagttcataattcccagttcatgcgcaatgtcatgcaaaggcatttcccagatattcttcatcacaccgtttatcatcaccataccattctcgtctgcctgtatcactcccatatctcctccggggaagttggcaagcaacacaccgaaagcaatcggaacaagcagcaacggttcgtactgtttcttgatacccagataaagcaggacgaacgcgatggcatacattatcagaaactgcggttcggcaatgatattgctgaacgcagtcatgtcatataagttctcaaatatctcgttcattatcctatcttcattaatacatcatcttctgaaacagtgtctcccggattagcgcagatagcagttatcgtaccgctaaattcggcacggatagcgttgtaagtcttcattgcttccacataacaaagcacatcgccctctttcaccgcatcgccaactttcaaggcagattcctgcgcattcttcaccaggaagaatttaccttccagcggagaaagaacatctttgccctctcctgccggagctgcagctacaggtgcagcaagcagttcggcatctccgtatgctaccgtcacacgataagcctgtccgtccacctgtacagtcagtgtttttggttttgcatcttcttccggcgatttatctttctctgcacgacgttttgccacgtctgccaggaagtcttccttcgcttttccactcttgtaagcctcatactgagccggatgcatggcatattcgaagagttcttcgtcgtcctctcccacttcccatttgttttccttcatcagcttgcgatacttgtcgagtgagtcggggtaattgtcctgcggattaccttcgaagaatttacgtccttcacgttcggctttctcgatgatttcgggagccagtgtacccggcaggcgtcctgctttacctagcagcatatcccagatatcgtcggcaatcattccccagcgttccttgcctttctccattgccatcacattcatcatggcaaggttcttcacgtactggctgaacggagttaccaatggaggataaccgacgcggggccatacatacgccacttcgttgaatagcttgatcagcagctgatcctgtgtcataaacggcaggttatgtttggctttatacttgttgatagattccagattcgattcgaggtcagccatcagactacccatcataccgccaggaagtcccggaccgatcagcagcgagttcatcagacggttcttcgggctgatatacaagccgaggaagtcatccataaattcctgaatcagcgcacgcactttcatgtaggcttccatattgatttccggtacctgatatccggcatctttcagcatagcctgtacgctgagaagatcggcgtgtcccgtaccccatgaaagcggttccatacctacgtcaatgtagtcgcaaccggcttcgcatacttcgaggatgcttgccatgttgaaaccgggaccggcatgactatgatactgaataggaatttcaggatgtgccgctttgatattggccacgatcttgcccaatgaaacggggcgaccgatacctgccatgtctttgatgcaaatctcgtccgcccccagcttgataagttctaacgccatattggtgtagtactctaccgtgtggatcggcgaatgggtgatacagagtgaacactgtgagatcatgcctgcctctttggcatacgtgatggaaggagcgatattgcgtacgtcgttcaatccgcagaatgtacgggtgatatctgtgccttgtgctttctttactttgtagaacaacttgcggacgtctgccggaacggggctcatacggagtccgttcaatgcacggtcgagcatgtgtgtctgtatgccggcttcgtggaacggcttcgtccattcgcgcacggctctattcgggttttcaccaaacaataaattcacttgttcaaaacctccgccatttgtttctacacgggcgaaacagcccatttcaatgatggcaggagctacctttacgagttggtctacacgaggtacatattttccggcagattgccacatatctcggaaaaccagactaaacttaacttctcttttcatgtttttctatgatatacttttgataggtttataacttttctacttttgtaatctttccttttcctaatgtcaccacattcacagctgctgtgatagccgccattatattacccggaataggcgcaggaccttgtagcgcttccttcttcgcaggaatcacttcttcgggagcatacttgttgacaagagtaatcagtaacttacctaaataaatcacaatcagcagaataacaaatacggtagccatgccgaccaccatcagcaggatcgctgtttcgatattttccatataataaactattagtaattcaagtcgtttgtccaaaaagcgtccgaaaataccaaatatttgtgataaaattaattaagagaggaataaaaaagtataaatcgtaaggttacaataagaaaaaacacattattctttgcatgtctattaaaaagacaaaggaaaagccccttgcggggctctttttattttagggagttattaaaatgttattaatctgataattaaagaaaatggccttcgtccttacactttttatattcacttatcaatctctatttttcaatcatccaatcccccagtgtgccactttcactatcaaaattaacagccaccttcaccactggcagtccacatagagcaaagcgttccggataattctttaaatttatctgttccatagcaactgtcgcattcttatccagtttcaattccatcacatataatgtggcctcagtacgcaacactacatccacacgaccacgggaagtacgtacttcgacatccacatagtatcccagcaagctgaatatgatatagaatacctgctggtaatgaccttcgtactttgtatgatcgcattgaggtatagtagacagaaaggtttgcaaacgccgtaatgccgcgtccatatcacctttccggatatcacgggaaataaaagccaccatgttcgtcgcctcacgtgtgtcattggttacataataaggcaacaagcttcgcatcaatcccaccctcacctctttattaggaatatccaacgtatatagttccaattccttatcgtaatccttgatagtgacatagccgctttgatacagcaatggagtaatgctactcatcgtttcagtgggagcatcaaattcttcgaccgccgccaatttatttcctatttcagaaggctctactccaaacttatccagcatctttatcagataggtaggagtgccgctaccaaaccaataagaattaaatttcccatctgcaaaagcattgagcagactgaatggattatagatgtcgggcgatggataagtgaaatgatagccgtcataattctctttcaacttagccagtacttcctccgcagtaatattcaatttgacagccatcctatccacatcttctttcatttgggtaagtatctcattctccgttatgccacaaatggcagcataaggttcatccatgctgatatttttgatgttattgagttcactgaaaatgctgagctgtgagaatttagtgatacctgtaagaaacacatagcgcaaataaggatcacaggctttcaacggactatagaagttacgcataacgtcacgcaatacccccaagttctcccgttcgtgtaccacatccagcaaaggagcgtcatattcatcaataaggaccacgaccttcctgccagtctgttcataagcacgttttatcagattagtcaggcgcaaattagggtctgtacctgctgcatcaatccctagtgtacgttcgtgttctgttagcatgaagtctaaaagattcatcagtttatctttgtccacgtgcttggccatactcatatcgaagtgcagaaccggatactgtatccattctttctccagcttctccatcgccaatccacgaaacagttcttcacgaccggagaaatagctatgcaacgtagaggttaacaatgatttaccaaaacgacgcggacggctcaggaacatataactggaagcagaatgcgtcatccggtaaacgtattctgtcttatctacatagaggaaatttccctcacgaatcttagaaaatgtctgtatccctataggatataatctctgcaaatcttccataacaactttctttttcacaaagctactaaaaaattccaatattcaaatgtcattcttctccttcttatatcgaatatacagttttgcccactcattcactttctccaaaaactcatcttcggtgcgagtcctataataatattcaagaatacgctcataatgaatcagagctttttcttccccttttttaccttttggtaagtagcaggtcccatatgtatctcttgacacatttttgaaagattcacatgtgctactttaagcaccttttcaataaactcaccgagtttaggatgcacgattttattttccatttttcttattattagttaaaaacacgtcttatatattaaacattttcacactacttcagacatatctgaactcgacttattttatttgtcttactttcgcaccatgctttgaaagtcaaagtcatttattaaacgtcctaatagaagtattctatgcaaaactttttcagaatgtcttatttcatgcccccgattgctcccatcaggaacgaacaaggacaaaccgttacacccgccactctcactcccttctgcgaagtctcagtagagcaagtatatcagatgatcacctgcaatgaaaatctcaaagcactgaccgaacaggtgcgcagcgccgaagatatacgaatggcgaaaacatccttgctgccatacgtgactccgtgcggcacattcatccgccggaacagtaaattcttcgcatctccttccggactcgtagtggtagatatagataacctcgactcctatcagaaagccgtagaaatgcgtcgtacactgttcgacgatccttttctccaccctgtactcgcatttatcagtcccagcaaccggggtgtgaaaacattcgtaccttacagcaacctgtacacagacgatcagagccgtaatgtaagagagagtatgagctgggcaatggaatacgtagaaatgacctacggatcagaaatgaacaactccatcgaaacagttcaaaaagccgtagacacctccggcaaagacatcgtaagagcctgcttcctcagccatgacccacaagcactattcagagaatattaaattataatcacgaatgatcaaacttcaattgtcaattatcatttgtcaattgtcaattatcaaaaaatgaccgatattgaatctttacgcctcctcaccgaagcagtcgaaacagcaggtgccgacattgcacccacttacgccgagtacgtacaattagcattcgccatcgcaacggactgtggtgaagcaggacgggagttttttcatcgcctgtgccggatttccgccaagtatcaatccgcccatgccgaacgaatgttttccaatgcactcacgaaacagcagggagcaatacatctcggaacggcatttcacctcgctgaatcgacaggagtaaaaatctgcagggaagaccggaagaaagttatgaacaaccggacgggtacagtaggtacagaaagttcaccgcacaatttttccacacacgcgcacgtatataataaagtagaagaagaaaagagtgaatcagaagaactgctggaaggcagcgacccgcatcacccattacctactttcaccttagaagactggccgaagctactgctacgcatcataagttatggtactaccgtcactcaaaaagacgtactcttgctcggagcattgactgccctgggtgccaccatggaacgatacgtgagatgtcattatgccggcaaataccaatcgccctgcatgcaatccttcattgtagctccggcagcctcgggcaagggagtactatcactcatccgcctgctcgttatgcctatccacgatgatatccgccaacaagttgaaaaagagatgaatgtctacaaaaaggcaaaagtcgcctacgaaatgatgggcaaagagcgtgccaaagcggaaatccccgaaatgcctttaaacagaatgttcctcatctccggcaacaataccggtaccggtatccttcaaaatattatggataacaacggaacaggcctcatctgcgaaaccgaggcggatacgatctctaccgccatcggttcggaatacggtcactggagtgagacgcttcgcagagcattcgaccatgactggttagcatacaaccgacgtaccaatcaggagtaccgggaaaacaagaaaagttacctctctctcctgctttcggggacacccgcacaggtgaaaccactcattccttcagtagagaacggacttttttcacgccagctgttctattatatgcacggtatctatcaatggatcaatcagtttgacgagaacgaaacggacttggaagccatcttcacctccattggtctggaatggaaaaagctcttgaacttactcaaggaacatggtctccacacactccggctcacagatgaacagaaacaggagttcaatgatctcttttccgaactattcacccggtcaacgattgccaatggcagagaaatgaacagttccatcgcccgaatggctgtcaacatctgccgtatcatgtcagtagtggccatgcttcgtgctcttgaaaatcctcagccgtatcaataccaggcatcttctcatcccctgcttacaccggacaaggaaatcgccactgataatatcaaagacggtatcattacccgttgggatatgacgatcactcccgaagattttaaggctgtgttgaaccttgtgaaaccactctatcagcatgccacgcatatcttgtctttccttcctccttcagaagtcagccatagggccaatgccgaccgtgacgcattctttgaggcactgggtatccaatttacccgtgcacagttgttggagcaggctacgactatgggaatcaagcccaacactgccctcacctggctgaaacgactggtaaaacagggactgatagtcaatcttgacggtaaaggtacttacgcgcacgcacgcgtgtgcgtgtgttagggagggcgggtaaaagtgtacctactgtacctgttgataacatcgtcttttatcgttattttatgaaaatcagagtatagcgttttgtgtaggctaaagctatgctttacgccttctaaagcggtgctttatggcctctaaagcttagctttagctaatacaaagcgcccctcgcagtctccaacacttattacctgttacctaatacttattacctgctcatggttctcccagcgcatccacaatcactcttacctccagcggagtgtaagaacggtgctgcggctgatagcccagatcgagcaggcgttcctgaagaccgggacagcggacgatccatttattcattttgcggtaagcggcaatgccggtaagttcgggagaataaagctgtgccagttccatgcgaccataagcacgtattttgaattctatcatgacaaataagtttctgttttacagtcacaaaagtaacaaaatatattcacattacctacgttttatcagggaataacagactataaccgacaacaattgcacattaccgactgtcactgtacacaaccgattcttccgagttacagcatactatctttgtatcatcgaaagggagaaatcctcacgaaagtatgtttaactctttaaaattattattttatgattcgttacaaaatttatcagaaccaacagaaaaaaggcttgaatgccggcaaatggttcgcccgggcggtaagcgacgagacattcgaccttgccaaacttgccgaacacatgtcgaagcacaattcaccgtattccagtggggtgatcaaaggcgtgctcactgatatggtggactgcatcaaggaactgctgctcgacggcaaaagtgtgaaaattgatgatctagccatcttcggtgtaggaatccgcagcaaggctgccgaaacgctggaagagttctcgctggagaagaacatcacaggtatgcggctcaaagcacgtgccactggaaacttatcaacgaccaatctgaagctcgacagccaattgaagcagcaggcggagtatcagaaaccgacaacgcccggaggaggaggttccggttcaggcaacactcccgatccgaaacctaatccggacgaaggagacgaagaagcaccggacccgactgtttaagtcataacctgaaccccgcaaagtctttagcttatcacggctaaagactcattaaaaatcaatatttttttcatttaaaatcaaaaactatgagtaattcatcatcccgttccgtttggagtttcattatcaaagtaatcatcactgtcgctactgctgtaggtggtttgataggagtacaaagctgtatgtaaacttatgcggaccatcacactgattatcattcattgcagtgccacgccggagggaaaatccctctcggcggaggcttgccgacaggatcatatccgacatcggggattccgtgatattggttaccatttctacatcacacgtgatggggaaatacatccgggacgatcactagagaaggtcggagcacattgccggaatcataacacacattccataggaatctgttacgaaggaggactggatgcggaaggacaagcgaaagatacacgtacgctggcgcaacgaggggcgctgttagctctgctccgtgagctaaagaaaaaatttccagaagcgttgattataggacatcatgatttaaatccgataaagaaatgtccgtgttacccttgcgtagaagaatacagggaattgtaggttagtatctataagcactcattgcatagcgatgagtgtttttgatttttacaaatacattgcaattttccctgctagaatttcttgccaaaacaaatatttataaatgtcttcaccaagatcttaaaatcaaaccaccatgagcgatgctgcaaataaaacaaatcatagcgaagacgacgcaacattttatccatcgtatctgtgtacccattatataacgtagcatacgaagtaacacccggtcgtatctgatacaaaaatacgtaacgaggatcgtgttccattatctgatcaatgaaatatttccgttcgggacgaggaccaataaaagccatctgcccgcagaagacattccaaagttgcggcaattcatccaaatgatgttcacgcaaaaacttacccactttagtcaatcgtttatctttcccacccttatataacgcagggcccattttttccgcatccaaacgcatactgcggaacttataaatataaaacggacggccgaaacgaccgatacgttcctgtttgaaaatagccggaccaccatcttcacgtttcacagctatataacagattaaaaataaaggagaaaaaataatcagtaatatgcccgcaataatgcaatccccaattcgcttgacattgcgctcaaaagcattcattccgtcgggaatgaaatctttattatactccataataaaatgattaaatttttagttatcagtcctatataacgtaatccaatactttcatttagaacaacagttcttactatttgatagcctttaaaagtgctttaacagcataatgtatatacaaaaagacagctctaccccaaggtaacttttcctcttttctcaatatattccattgccaagacaatattttcattttatttgatgaaatagaatgattccctacacgataaagagccattacagagttagtgttctgagctttatatcctttttttaagatagaaagccacaaagcacaatcttcatgccttacattcttaaaatacattttacctactttttccgtatcatacattacagtcagacagcctatacaattccccctcaataataaatgataatctaccactgaaggagcaataattttacgctttgtacgcctccctgcctgatctactttctcgaaatttgagaaaaccattgctacattaggttgatctataaattttaactgctcctctaattttttaggtaaccaaatatcatcactatctaaaaaagcgatatatcttccccttgcttctcttattccgatattacgtggtatggatggtgaacctgagggttcatttgtttttaaatatctaatacgaaaatcttttgcttcatatttttttataatatctgcagaattatcagtagaacaatcatcaacaataatcatttcccactgttgaaatgtctgcattataactgattctattgattgaacaatatatctttcagaattataacaaggaattataacagataccaaaatcattactaataataaaatgtgaaaagtaaaaaaacagggaacacatatattcaaattttccaataagcttcaaaagagtgaccaatccttttttccactggaggcaattgcatataatcaccgtatgtattttttaaatattcttgatataatatagggacctcaaaactttctttttcaaaagataataataacgatgagtcaaaaacctcttttctataaatgcatattttagcttccggctctaccacattagagacataatttgatgattcataagcatattttcgagccaatcgctccatcctatttacaaaaaactgaaaaccaaagatacggacgatcttccatgctaaataaataataggagtcatcataaaagatgtttcaggcatcttaggatgtgcagacaaagccctcatcctatgcaaaacacgcattttaaaataatgaattttaaatttatcaggcataccgtctaaggggaaaatatcaacccaaatccccatattttgaatagtttgcaaatcattttccacacacaaagtacgagtatctatcatttttgcatgagtataataataatcctcattctttggattacttaagattttataataactatgtctcaaggaaggaactaactccaataatcgctcataatctgaacgtggcatcattatatcaatatcatcatcccaaggaataaatcctttatgcctaacggctcccaacaaagtaccccaagctaaataatagcgaagatgatattgctgacaaattttccgaatatacaataaagcgtcaagttctactttttttatttcttgttcagataatctatttcgtttattcatctccatctttttttatatagatatctaataatagaaaatacccatttaaaaagtgcctcattccaaacaaacaatctcgctgtaagtttttcggatagtcctggatgagaataaagatgttccatttgtctttttagatcatacttttctcgaatgatttgatataaatcattttgcccagacaaaatagctaaaatcatgaatttccacaatgtacgtgaaaattcaaattcaagccctctaacagaataattcacttttttatagtagttgaccgtgcgttgtgaagcttctatacttgtcaaacttttaatagaaaagattgccatggctgactgatcatttacacgatagtgataaagaagattgtttgtataacaaaccttattagaataaactaaatatttcaatataaattcacgatcttcaccacgagtacaccctatcacaaattctaattgtttctcttttataatattatgtcgaaataacatacaacaaatctgaggattgaaacttttatctagaataattctttctatacaacgtttaccactcatttctatatatccttgagcatcatccatacagaaaaccatagaacgagtaaaaccacagattgccaaatcagcctgatgacttataagctgtaaaagtgttatcaaaaaattaggttctatcaggtcatcactatcaacaaagcaaatatactctccttgacactgggatagagccttatttcttgcgacagacactcctgcattagactgagaaataattttaaaacgctcatccaatgtagcgtaatgatttaaaatagataatgtattatcttgacttccatcatctatacaaatcacctcccaattaacataggtttgattcaatatagacaataaacaatcagacaaatatctttcagaattataacaagggacaattatagatatcaacattttactatttgaaaaatataaacttatatgggatataatatgagggtacaccttttatgaatggaacgaataggtacaataagaaataagaaatacatagaaaataagaaagaagcttcacttgctctcttagttgcccatccaatcctttaaccactttaggaatcaacaaacaataatatatattaaaataaaacgctattctcccgcctaaatgagctcctaaaaaagatacgaaaacaaaacttaacaataaaacattaaataaattacacttgtttttatctatgtttttacttcccaaaacaaaacaaataataaacaacaaaaagtatattaattgagtatatttcccaccttcaatatccatcttgccatcaagataagaggtatacacccctaatatatttagcatataaaaaaataaaggtttggctactattgatattatagataataatacaactaatctaaactttagaaatggcaaccaatatataataatcgctactcctgcagaaggatggaataaagctgcaatcaatatacataatatatatttaattagtgaacgttttactataaaacgataaccataaaaacaaatagccaaagccaaagcttgtcgaataatactgagtgatgtaaaaaagaagaaacaaattaaaatagttactgataacgcataatcttttgaatatttttttaaagtaaatattagaagagcaaatgttggaagcccaaaaagaacaaataacatctgtggagattcaaaatataaagcaatctctgcccaaacaatgcttaaaggagaaaataagtataaaatctgtgcctcttcttcattttcaattaatgtataatacgttaaatagtcataccccactctataacgacaaattacaacaaaaattataataataggaacacaaattcccgctacagtagaatattgtcttttcctactttgtatatataacaaaaatagcacaattagtaaaaaaaatagatagaacatgtattatctactattatttacttttatcaaacaattcaattctaatctctctaccataaaagatatcagtatgttgcgcatctgaatctttccaatgaggatttggaatcatatagtctttaccataatgcatacaaagatgttcctcataattttcaggaacaaaagtattaattccaataaatgaatattcaatcaaatcaattctaggaaaatgaattctccggattgcattatcaccttttttagttctctttatatctgaatatactggaacaaaatcataacaatagaccccatcacaatttttctctcttgaaaaaaggaaaagatcaattgtcacacctttataaagataagtttcctcataagcatcaataaaatcaagggcggttatacaccttattcttttgaaaccatatttttttaagacctctcttattatatctgaataatcttccttaaaaaggcccacatcaagatcaaaatcatgacttataaaactgtgttctctaacagcacctaaaagagttccaaattctaaccaataaggaattcccacttcattcattgcttgatgaaagttagttagcagctcttgtgaatactgcaaaaatattctatttctattcttcaattttctattgccataaacaaataaatatataggacgcatataggttctataccaatgattccgtcgtattttactaataatcaaactcagtttatccattacctttttatttttaatataaccgcccatatttcatcaaacaaggatcgagaaaagcaatacaacaacgttccatatagcaataaagcaataacacttcctactacaatttgaacaatttcaccctctaacaataaaatcatataccaagtacctcctcccattattaatgctaaaaaaaagcttggtagtatatctctcatctgtctaataagacttaatttaatcaatgattctgtataataagtattcaaatacacagcaatcaatgaatacataacacgcccccaacacatacctacaatcccccaaggaatagatagaagaaggatccccgtcgctaacactttttttataacttctaaacgtaaagccaagtctgaacgtccctttacatatagtaaattcaaatttatactactcaaatgatcaaacatccaatctaaacacaatatttgaagcaatacaactactcctatccatttttctgtcaaaagcaataataccagtggctgagctatgacaattaacaaaatcatcaatggaaagataaaagcagaagataaacggacatatttcctatataaagcagataatctatcattatcattttgcacaaggctcaatatggggtatgtcactctagaaattattgcactcaaattatatgaaggaaactgagcaaattgttccgcacgagtataaaatcctaaatcaaccgacgaaaacttctttcctataactatagcatacagatttttatataaagtattaagaatattagctaatactaattttgacccaaaagcaaataataaacgaaacgatttcaatgaaaatatccacaatggtttccatctacaaaaatatgcatacaaaactacaatcaacaatccgtttactaaagtttgtccaactaaagcccaaactccaaaatctaaatatgcagcccaaatgccaataatacctgaaaccaaagctgcaataaatgagacttttgattgagttttaaaatctacagctattattaatttagttttaggaataatcgcaaaggaatttaaaacaataacaatagataaaattctagtaatctcaactaattgacctattttataaaaccacgatatataaggagctagaaaaaaaattagaaaataaataactaatgatgctaatatattaaaaaagaaaactgttgaataatcaatttcagtacgttccttataacgaataagggcattagtaaaaccactatccattaacgtttgagataattgaagaactattgctaacattcctaccattccataatcagatggcaatagaaaacgcgccataatgactgtaactacaaactgtatcccctgtgataaaaatcgttcaactgcactccaaaagattccacatatggctttgttctttaaagaagttttttctttcatttattaaaacgttttttcacaatagctggtacaccagctaccaatactcctgaaggtacatcttttgttacaacagctccagctgctactacaacgtaatcaccaatagttactccaggaaggatggtaacattagccccaatccaaacattatctcctataactaccggtgcctttttataaggataaagaactgctaatgcattatacggtccattaggatcagcagttgtcaatatagtcgttccataggcgagtgttgagttttctccaataatgattttatcacgagcaatcagataacagcctgaacgtatttcagcatttttacctaagtagatattgctatatttgcctactaagcgaaagctacgaataggcactccagaaataacactttccggatggaagtgtataccacgaagggaaaaataaaaatgacgaatcttcaataatatttctgcaatcatgacatcggtaatgtgacgttataatgatttaatgcagcttttagtactttaaagaagttctcaatatcatctacttctatctctcctaaagcacagattctaaaagtatcctcagttgatatcttacctggataaatcgtaaatccacgctcataacaataatcatgtattttctcaaaatcccagttgggatcttctgggtattgaactgagacaaccagtcctgactgccattcacgctttattacacttttaagaccaatttcatttataccctcaaatccgcaactaagcccttgaacgtccttattgcgtttacacgtcctctcattactgaatttgcagataatttgaacttgaagcacccacttctgcctacaatatccccttaccccacaatgtgacttgaggcaatacacaatatcattcccataagttgtaggcattatccaaaatcagtctggaaaacatctgcgtaagcattattacaggtatagatgttcagcacataccgccttgatgtcctgatccacttggctggtacagagataaacctgaagacaaacgcttttatgcgacttgttgcattgagcccgaacttctttacgtcaagtctttgaataatggccttgtaaaagttacggataagtgctgtaagaagaaggaacactgtgttctctgccatgaaggatttgggcaatctgtcccacccgaaaccattgttcatatcatcgaagatacgttcctttcctccacgaaggttatagaactcgacaatttctcttacggaagaatcatagtcgttagtcaggatacaacggtatgtgtattctccttcccaaaaatcctgcacaccatccatccgtttctgtctttgaatcacaagtcgatatgccttacctttccacttctcaacaaggatagagttcaattcaaactcaatgccattgatttcctcagttttccagcctttgagagcaaaggtgtcattgtagatcgaactgcagcggttagcacggatatagaaggacttgcagtgtttttctatttcctccacgatttcctcggaacatgatccacaatcagctctgaagcgattgatagtgagcccattctgttcaaatctcgcaaagaacctcttcagcgtgtccttctgatggaaacgaacatttgtgttaccatcgctattctctataccgactatcaaatcgccaataaccgccacgccagggcgataaccaaggaacttcttgtatgtaggctttgcatcatacttctctgtctctatgaactgatggtcgaaatcaacatcatacatctcaccctctttcagttggccagatgcaaatatacaattgagcaataaagtattgagagtgtcagccgtattgaaatcgtaggtcttgcccatatctgatgtgtatgaaatgttttcttgcgtcaactcctttatcgccctgaggatagtatcagagctacaagtgcgaagtgtcggatgaagcgagaggtggttcatcaaatgagtagtgacatcctcaatacatgaaccgctacagaagtagatactcatgagagaacggatgatttcgctgtactgataaccgaacgatctacaccttagaccgagggttgagtcgattacagatgataatgtggagtcaaattgctccatgattgaaaataatcccccaaaaggagtgagtctctcagatttaatttgtatcttcgccatgtctatcgtcggattctcttgttttttttgcaacactaagataagtgaaaattctgacatggcaaaatcctgagcaactttttgttgctcaggtacttaaaaagtttaatttataatagtgttgcggaattaaggtatacctgaatgaatagcctcaaaaactcttttgtgacgggcaaacttagcttcttcgcccacttcaaaatattcatttaatgcctgacgagtggcgtaaatagtttgtaccggtggagtaaaatgcatttcacctgttctctcaaaattctcatactgcaaataaagattacaatagtaagaacgcttgggatatttttttgaaaacttaatctgttcctcattgcctataataaaagaaagacctgtcatcgcttgaagtcctttttgagcagatgccatacaaaaatccacattatctttctctatatcaaaaggaatcatgcccaaagaagaagtagtatcgacgacaaatttagcctgatatttatgagctatagcgcccatctcgcgaatagggttcagaattcctgtacccgtctcgtgatgagtagtataaaccatagctatatcaggattttcttgcaacacattttccaccaccgataaatcaggacgttcgtaaacggaaaattccaaattaatatgaggcaaaccataatattgacacacttctacagcacgggtactatatgccccattattcactataagcacccttttgtcttcaggaagaagagaatttagacatatatcaatattgatggttcctgagccacaaaataatacagcggtatgtttttccaaattcccatgagcaactctgaccaaatcgtcccgaagttgtttcatcatacctgcgaattctttctcgcgaggacaaatatccggaacaacttgtgccatttttacactgtcagtagtagtggcaggcccaggatttaataatatttttctttctattttcatcgaatatatttattttaaaaaatccataaaatgctccttattctctataggagtagtcgtgggacgtcccaaattctcccgagaatctattttaacctttatttccaacaaaacaggaccacataactttggaagctgcttcattgcttcttcaatttcaacttttgtacaaacagtataagtatgcttatatccgctcccccggacaatagccggaatatctaaactaaatcctaaagtaggctgtcctcctacagactcgtgagcaccattgttaaacaaaatatgataatagtttttaggagataaatcgccaatgttactaattgcccctaaatgcataataaatgctccatcaccatccaagcaataaacaggtctatcttgctttgctatagcaatacccaaagagattgatgaactatgtcccatagagcctaccgtgagaaaatcatgttcatgaccttgctctttcatttctcgatattcaaataactcacgagaaagcttgccagtagtagaaacgaccactgaattttcaggcagataatccacaactatttgcaaagcatcctcacgagataaaggataattacatccgaactctttttgaagtttatatttgccaaaaacatctttccgaataattattgcatgaggaatattcttagtttttgctgattgtatgatatcatggagctgaataaatgcatcattctcatttgaatcaagaattatataaggaatccgcattgctttcaacaaatctaaagttacctcaccctgttttttatgctgaggttcatcttttgttcccggttcaccacgccagccaatcatcaaaagcattggaaaactgtatacttgttcatctgcaagagacagcagaggattaacagtattacccaagccggaattttgcatataaaccacaggaaccttacctgatgccatataataacctgaagcaattcctacagccgcaccttcattagcagctatgatatgtttctcacgtgaagtatggtctgtgatataggcacaaatattttttagtaatgagtctggaactcctgtaaaaaaatcaacgtcatgactcagaaacgtttcataaactttttctacgcttaacataatgatattcctctttttatttagtacccggaatcagttccaatatttcctttatgggcatacacagttcgcgcacctctaaagcacgttcattctctaatattgtctttgcgacattcatcatagcaggataagcggcacgaagcatatgattagcataaataattatattcacaccccaatcacacaattcagactcataaatatgatcatatgtagtaggcacaaccacgataggtacatgagcatactgttttcgaaacgccaaacaaaattcttttatatcttcacccgacttatttttgctatgtatcataataccgtccgctcccgcttggacatatgcaaaagctctctctaaagcatcacttaccggctttcccgctataaggctctcaatacgagcgataatcataaaatcatcagtaatctgagatgcctttcctgctttgatcttattacagaaaccttcgattgtatcttgagtttgaataacatccgtaccaaacaatgaattcttttttaatccaactttatcttcaattattatagctgagattccatgacgttctaaagtgcgtactgtaaatacgaaatgttcaattttaccacctgtatctccatcaaaaataataggtttagtagtacactccagaatattattcaaatcttgcaatcgggtagttaaatcaaccgcctcaatatcaggtttacctttactggttgaatccgtaaggctactagaccacattccgtcaaatacttccctcttatccccttttaatatttcctgattttcaattatcaagccacatagtccatcatgagcttccaaaatacgaactacgggtttggcatttatcaaacgacgaagtgattttaaacgtacatcgggggttgtacctatagccttaatatctttatccaaagaagatgaattaattcccaaagtatatggaatttcgataacctttcctccctgttcattcatcacttcaaatacgcgcacacgttcttcacgtaaaggcccggttttccagtcgtcaccatgaattatatagtcaggtttaatgcgtttgagattctcaacatagctccattcttcttgaggaacaactttacatacgcctttaatattctgaactacctcttttcgttgttcataggtcagataaggaaggcgtttatgctccgcaatagctttatctgtaagaagaccaattataacatcaccgtatttagtagcctcattaataatgcggataagtcctggatgcataatatccgcagtcatcccaatataaactgtcttactcataatttgatatattattttaattaacaatacggaacaatatatttctctgcatattccaaatctgatatgtcatcgatttcataccatttcagcccttctactttatgcacataaacaggagattgagaacaagatattcgtagtaattcatactcatatcccaaattgggttgttcatcaacaatactcgcataatcagcacacattattttgtaaaaggaaccggatagtttatggatgccgaccaattcgcctttagcgtttagtttattcttattgacagaacatgaagaaaggcgaaaattatcatcatgttccacataatactgatcttgaaactttgtcactggagctattagcattgcatctgccgcaggacactccaataagctcattattgcttgtttctcaaaaatcaaatctgactctaacaataaaaaatcatcattgcccagaatctcccgcgtattatataaagtatacatactatttgtttcagcataacgaggactaaaacaggtttcaagcataggatagtctgtcttcaattcttcataaacttcttgtttatatcctgtaccgattacaattcgctcaatgccacatgataacaaagtatcaatagaacgaactatcattggaatacctcccactttgacgaaccctttaggtatcaattctgtatattggccaaaacgggttcccatgcccgcagccattatcatagctgtacgtatcattcgtttaataatatagtaagtgaatttaattgatataagaatgttgtaaacgacgttttagcatcatttatcctgttctatctccttatttttcagttcttttctcaagctagccagcagacttttgccaaaaagcacccacacgagagtaccagatacggacaggaacacaaataataaaatataaattttgagtcccatacctgaaggtttcaaaggtacaacggcaggctcaactactgcaaagactggcttttcctcctgtactttggctctggatacctgcaactgattagcaacctgactatatatctgataagccaaactcatgtcgttctgtaaacgctcctgctcagcacgtacactttgaagaaccacattatcatgggcgtctacataatccgcatattttctttgagcagcataatattcctgctgacgttctttaaacaaccgttccaaatacgcacagtcttcttttacttttgaagttcgatacccaataatatattcctgtaatttatgaacgacagaatctgctataaccgcagtgatctgcggattttgtaaggtgaccgtaatgctcgttatggcggttttcttatcaatggatgcactaatcttctttttaagaaaattaatcttctcatttacttctttcgtcaattcgatagttccttgccgccctccactggcaggaaccgtatcttctccgaataatgatttaactcctcctattactatgcccggaaaacctataagataatcccaccaaggagatgactcttcatcgagataagaccccaaagtcattttatcatcctttttagaaacggagacttccatttctaaaagttccaataaaaaaggagttgaagaaacaatatctgctgaaagagaagcgttcaaggcatctgtgctttcccctattagagccccatctcctaaaaacgaggcagcaagtccggctaaaccattactccccttcgcattacccatttcaggagaaagggtaacctttactgtatactgtttagggatacttaccgctacaattattccaataataaaaccaattccaacggctttgtataattttttacgaatagcaataatcttgcgaaagatatcgaccaaatcaatttctatctcatcactttctgtcttgtgtggttcagagagcaagtttttatcctgtcgttgttctgacataaaagtaaattctattatttctttataagattagcaatagaagcaatcatcatacccaaagaactgaaggaagtagcataacctaaaatattagctatgttccctttcttcttagccttaccaggcacaataatctcacaccccggctcaatctgtttcttaccactacccttaaccttcgtcacctgaccattcatgtaaacaatgaacttcttactcttccttgcattatcagaatagccaccggcctgattcaggtaataatccacatcctttcccttcatataagaaaccgtattggggaccataacagcaccattgatagttacagtattagtattcttaggtataaagaccacatcaccttcacgtaggacaaggtcggcactacccttaggattagtcaaagccttctccagatcaatgcctaccgtaaaggtatcctcaacaccaatacccaaagagtcaatcatggcttcacccaattgcctgctcatcaggcgaatcacatcacccatacgtttcttctcacccgcacttgccacacgggtcaatttcgcaccacggagataggcaagactggtaggaccacccgctttattcaccagatcggaaagacgttcctcacggttggtcatggcataatttcctccaaacaatatttcaccatcaatgactacattctgttgcgcctgataaccgggactgcgacggacataaacttcgtcataaggctgaaggataaaaccgggctgaccgtcgatgacaaaaccatcctttaaagagaaggtatacatctgaccgatagtatcattatccgcggtactacggggattcttgattcgtctcgacacatcaatgcggacagtagaggcggcttctttcaagccaccggcctggatgatcagatcctcaagtgtcatgttatcagcgtagggataggaatcagggtgcgcgacttcaccgtgaactgtgacattgccacgatcttccagatcgtgaatgctcggaatgtaaaggatgtcattcttcatcagggcgaggttcggggaagtaccgtccatgatagacctgatgtctatctgaacaacttcactggtcaggtcctcacgctggcgataaaggacggcacgattcaggaaagcgtcaccggtcagaccctgggcttcattgacaagttcgcggatcgtgttcagtttaccgctgagctggtagatgccgggacgatagacagcgccacggatttccagtttgtttgtgaagcggttaaggatggcttcggctgttacaacgtcgccgttacgcattgtgtagatgctgtagtccatatccttgactgtgttgacctcatattcctcaccattctgacggacaacacgtaatgaacgggtgtaggcgtcagcttcaaagccgccggcatatttgattaaagtggcaaggttctcgtctttcttcatttcgaaacgcataggacgttttaccttgccgctgatctttaccaagacatcgtaggcggggacgataaccacgtcaccttcctgaaggcggatgtcatcctgtgtgttgcctttcatgataaattcgtaaacatcgatggtggcgatattctttccgttgcgtaccaactgaacgtttcggaggctgccgatatcactcacgccgcctgcacggtaaagcgcgtggaagacggtagagaaggaagaaagggcgtaggtacccggctgcacgacctctcccatcacgttgatctgaatagtacggatattacccaaagtcagacggatgtcggaagtagggtcggtagtattgttcagaccgttatagatcttattcagggcgcccttcagatagtcgttggcggcggagactgtcataccgctaaggttgacaggcccgatcttctgaatattgatggtgccttcaggagagatctgctggcggatcgtgttctggctggcaccccagatatcgatgatgacttcatcaccgggacccagacggtaattggcaggagtggcaaggttgacactaggctcgaacgtcaggttgcgggtattgaagatgttgcgcccgaaaacctgatcctcacgggccaaatcttccgtagtcggatgatcctccagcatgtcggaagtattctccttagtctcttcacgaaggcgggactcgttgatatccgtacccgtggattgggaggtgtttacattgttctgctgctcatagagctgcttcacacgcatagcctgttccttggtcacacctttacgcgcaagctcggaagcaagctgtttctgttccttgccttgccggatgccgtcctttacatattccagtacctgtgagtcactcatggactgggccataagcgagccacttcccagcatagaacaaaaaagtagaatgctaaaaagtcgttgtattttcattgacaaataaaaaagttagttggtttcacacagttcctgcataccgtgacagaccgcagacaactgttgtttaagaagagaagggggaagaacatcaaggagggtcagagaacgctgcaagacagaccgttttctatcctcgtcttccggattggcgtacatcgacacattatatccctgaaggatggccaaacacagggtagcatcctgctccggtgtcttcccccgttgtgaatataaatcgtttatctgtttgtggatggatcgttgtaaggcggaaaggtcatccagatacacgcagcctgcactccccccaccaggaagcagcatgcgtaccaaatttaataaaccctctatgttttcctgtaaaataacagcatccatatccctcaccttaaacagccgccataataggctctacataaccgacaggcatatccacacaggcacatcccagcatattcaggcgaacggcgatcttactcttgccatccacattaaccagttcgccaacaagacccgtcagggggcctttaatcacgcggaccttttcgccacgggccaaaggggcactgttcatgctgatcgattcttcagaataatcaagcatgaaacggaaacgggccatctgctcgtcaggaattacggcaggactactctcgccgcgcatcaccatgtaacggctcacagtagaaaaactcaggacttccatgcgttccctagggtcaacgtgtacgaagaccatcataggaagcaagacggaggtgaccagcttgcgacggtcgctccattggtggaattcctgttgaacgggaacgaaattctcgatacccatcttgtccagatgctcggaaaccttcttttcatggtgcatccgaaccaaagcaacataccagcgttttgagtgtgctacgccttcccctgtcccattaataggcccagcattgagtgatttcttttttcttaaaatcatgtttttttaccccatgtttatccgttacttcttaggtaactcacaaacaaaggacaagcgaaacagggaacttttttcaacgaaaacatcggaagaggactggtattcaggaaataaggcagaagtgaaggtgtttttcataaattggaataaaaaaaagacataacacggatattgtcattttccgtctgttatgccgacttttgattcattttaagaaattaatttcatttttgtttgcgtattttcataaatatgtccatctttgcgccatgaatcattccgttacctaagaagtaacacacaccaataaacactgtatatcaggattctaaatcacacatacaggccagaaccgcacctcttaacgtaagacaaattcatccggtttacctccgtacgctctttcagctcaaagcctttcagataaatctgcgtggtcttgatcgacttatgcccaagcgactcgctgatcatctcgatagggacaccacggtacttggcagtggtagcccaagaatggcgcagcgtgtaggaagtcacggggaagttgagacgcagccgctttgccagggatttcaggcagtagttgaatctccggagagcggactggtattcacggtaagctttctcatccttccttttcttatctccctgaaggatgccgaaaaggtagtcgggacagccgggacggggagaccgccggttacggagctgctcgagcatctcctgtgcgctgtccagaacctcaacgctcatgggagtcttcgtcttgacacgattgtagcgcagcacgttgctatcaagagcggatttctccaaatggctcagatcggcgaaagacatcccgcagaactggaacatcagagcggcgatagcctgggtacggcggagacggtcagaatgggggtcttcataaagaagcctgcgaagagcgacgacgggaagcgcctttttctgacgaacgtccactcccgtatagacctcatgaaacaggcggtggacataaggagcgctacccgcctccacaccacgattgtagatactacgaagcatacgcatatacgtggaaatcgtattgggcttcagaccacatgcgtaaagatgctgttcgtaacggcgaaggcggtcacgggtgacttgacggaaagacacactatggacaccacaaaacttgctaaaagaaagaagcgcgttctgatagacatgcgccgtagagtagcggccctcctcgcgcaaacggccgatatagatatcggcacaacgactaaatccatttttattcattatttacatcactagttttattacaacctacaaagtaagatgaataaacacgatatcttagttttatcttgtttgactatattaaaattactaaaaagctgatgctcacgaatccgtaaccccaatcgagtaggaggaaaacgaagtagaagttttcctcctactttcgttttccgacctctcacaccaccgtacgtgccgttcggcatacggcggttctcttaactgcgatgcaattgggtataaagaattatcattgacggataacccgccattacaagcttatctgttgtgattgctctatgcaatatccaactatccgcaatgcgccaatagcctttacgggtattcgcccattcccaagatttccgacgagggatgccacacttctgcaagctggcaaaacgtgtacgtacccgcttccaactcttccatatatacattctaagacgacgattgtaccacttcgctgttttgattataaaatctttcatatcggcataacgatagtatgtcagccaacctcggatgtattgcgtcaggtggagtttcagccaagcgtagccttgaccactactacggctggtcaggtgcttgatggtgcgtttgaacttggattgacttttcttatgaagattaagaccacatttacggtcggctcttcagtagaaggagtgtccaagatacttcttgccgcagatggaaccgacttctgtcttctctttgtttactttcaagaataacttcttttctataaactcggaaatactatcacggactcgctccgttgcccgaagactatggacaaggatcagacaatcatcggcatagcggacaaacgggtgccccctgcgttccaattcctggtccaactcattaagaagaatattgctcaatataggactcaatggaccaccttgggggacgccctcggcagtctccgcgtatttgtgagatactacaactcctgcattaaggtatttgtgtatcaaagatattacactgccgtccttgacggttcgggataagacctctatcagtttgctgtggttaacacggtcaaagaacttttccaaatccaaaccgatacagtagcgataaccttggtctgcatattcctgcaccttatgcagtgcatcgtgagcactacgatgagggcggaagccgaagctgttgtcactgaactgaggttcgtaaagcggtatcaacacttggctgattgcctgctgaacaaagcggtctaccactgtcgggatacctaatgggcgagttttaccgttgtctttcggaatttctaacctgcgcacaggggacggacgatacttccccctgcgtatcttttccaacaattcgtctttatggagggtaaggtatggcaacagttcgctcgtctccatcttatcgacacctcccactcctccattccttacgacttggcggtatgccgcattcaagttcgatggacttagaaggagttccaacagattgttttcttccaattgcacttccacaagctgctcatcttttatctccataaaagtctgcactcccacatactcgtcggatgctgtcctatccatttgtgggcagttcgttttactgattttccgcattgactctttcataaagtattaaatggtacttgtttgattaaaagttcagtccttcaccgactgccgatttttttaccttgtcggttactatgacctctgctgacttctcacggttcgttattactgcttgactgtatttatttatttttcctcgcccgtgagacctccccagttatggacatattctttccatcttatgtctgcttgatttactttggatgttccggacaactataggacttcgttttgtttagcaaacttatccacatccttaagccttaatatcaagtttctgtacgtcagaccagatatttgccgcaggcttccttcagattccacctcacgatggacacccttgccgttggctatatacttcccgttgtcagggcgctttagggacttacacccgttagaatatgttcgtgctgggcgaactaaaaaatgtgagagaaaacctttcaattttctctcacatttggaaaacaataaaattaaactcacttactaattgccaattcgttcgctattgctttcttttaaaacagcaattggcatcattcttcgttcttttcaagagacttcttctcttaagcaatctaattctctacctaattattaatttactccccttaaaattctgtctagccatggacagttcatccacctgttatctattgtctgtttataaatagttccttatatttataagaggagctttctttccttttttaccaagaaaaatagaagaaaaaatagatttaattaaaaaacgccttccagagcactctgagaggcgttttttaattgcagaaatatttcacttcctgctttatatcaaggataatttctcttttttacggtgtggacttctgttcccgtctattctaatatgactttctgcccgctcaactgataattgattcccaaagaaccaaatacttttttcaatgtttcgtgcagatctctcgtcaggatggttccgttatagtacagttcattatatttttcacaccctaccacttccacatcaaagatatgctgaatatctgctactacattgaccagcggatcatcttcataaccgagtacttcgggcagttcttccttttcctgaacaggaccaatcttattctcatcacagcgtacactttcaccggcattcaatgtctgttcgccgattggtgtctctaccttcactgttccctcttcacaattgacagtgatcgtttttccttcctgctcgaccaagaattttgtacctaacaccgtaacatctccggcttccgttcgtacagtaaatgttttacccggagtcacgtcaaaaaaggccgatccgagcagattcagtttacgcccccaaagccaactcactttattataagacaaagttgagttttgcatcagcttcacagaactgccatccggtagcttgtaatcgacagctactgcttcagacgtaatcttctcttccgacagatagtaataaccgcctattccgaaaagcaggataaacagggccgctactctccagtagatacaactgctcctaagaacaatcagtttctgtcttcctgcagcgttcggtctgcttgttaatgcatccgcacgtttttcttcacgaaattcttctaacttcccaccaactacagacttccgtgcaaacaactcacctttcagaggaagtttgccgtcttccatatattgttccagaagttctttcctattctccatatcctcacctcaattaaaaatccataaattagcagctacagtcaacaggaatgatttgctcaatcgctctctcagtctggatattgccatgtgggtagtattataaacagtacgggaagtcagtcccatcacttcggctatttcgtccgaattcagttttttataatacttcaagtataatacctctctctgctgctttgtcaagccatttatttctttctgcagaacttctaactgctctctttcaagttcggaacggacaatcgctgtttctatgtctatctccaaatcgaatctatattcgcttgagttaacttcgtccaatgatgtgaatacgccattagcagttttcttcaactcattcagcagcatgcgtttcagcgccacacacaggtaagcggatatggactgaggctcggaacaactctgcctcttctcatacagataaacgaacaaagactgaatggattcagttaccagatcatcatcaccggcaatcttcatcccatatccgtaaagtaaatccgaatattcattgtagagttgccggaatgcttcttcatccccctgctggattttctcccaaaatgttgtattcatttctccttcccttatttacaggtaacataattcttccccttttaccaattatttttgttaaattccaccaagcagactaaaattcacttgtgaagtggaatttaatgtgcttgaagtccatttgtgccatctgaagcacataacctgaatcggcaaggaatacgtcacgtccttccctgtctttcgccatatattggtatttacgtttcttgaaagcttccagctcagcaggatcatcgctttctacccaacaagccttgtacaaacttaccggttcccaacggcaagaagcattgtactcgttcagcagacgatactggataacctcaaactgcaactgtccgaccgtaccaataatcttgcggccgttgaactgattgacaaacaactgtgccacaccttcgtccatcaactggtcgataccctttgccagctgtttctgcttcatcggatcggcattttcgatatacttgaacatctccggcgagaagctgggtaagccgcggaaatggagcagttctccttccgtcagcgtatcaccgatcttgaaagttccgttgtccggcaaaccgatgatatctcctgcataggcttcgtcaatggtcgttttccgctgtgccataaactgggtgggcgatgagaaacgcatggtcttgccatgacggacgtgctgatagggtgcattacgtacaaatttgcccgaacatatcttgcagaatgctacacacgaacgatgattcgggtcgatattggcggtaatcttaaagatgaatccggtgaatttcggctcatccggtttcacttcacgctcttctgcctgtacaggacgaggactgggagcaatctccacaaagcagttcaacaattcctgtacaccaaaattattcaaggcagagccaaagaatacaggcgcgcaatctcctgccagataagattccacatccagttccggataaactccttcgatcagttccagatcgccacgcagcttgtctgccagcggcttaccgatctgcttatccagttcttccgtatgtatgtcgacttctaccttctccgtcaccacttgtttggaaggttggtacaagtccagtttcttctcataaatattatatactcctttgaagcgggctccctgttcgataggccatgacaacgggcggacctgaatcatcagttcttcttccagctcgtccagcaagtcaaacgggtccttgccctcacggtccattttattgacaaaaataataaccggagtttttctcatacggcacacttccatcagtttacgggtttgtgtttccacacctttcgctccgtctactacaatgataacactgtctactgcagtcagcgtacgatatgtgtcttcggcaaagtcctggtgacccggagtatcgagaatattgatcttgtagtcccgatagtcaaattccattacggaagttgtcactgagataccacgctgtttctcaatctccatccagtcggaagtagccgttttcttgattttattactcttgaccgcacctgccacctgaatctgaccaccgaaaagcaataacttctccgtcaatgatgtcttaccggcatccggatgcgcaataatggcgaatgttcgccgtctctgtatttctgtattatctgccatatttattataaggtatcgatgcatcttttcaggctttcctcccaatgaggtatttcgatgccgaacgttgtttttatttttgttttatcgagtacggaatatgcagggcggttcgctcttgtaggatattccgacgtatgcagaggtttcactttgcatgaggtgattcctgccagacgatgaatagctaccgtaaagtcataccaggagcagactccttcgttgctgaaatgatagactccacgaacgatgcctttattaataatagcaaagatggcctgtgccaggtcattggcgtaagtaggagttcctacctgatcgaaaatgactcccaaactatcacgctctttgcccagacggatcatcgtcttcacgaagttgttgccaaaagtggaataaagccatgcggtacggataacgactgacttttcgcaatgattcagtacctcatattctccttcaagtttcgttgttccatataccgaattcggacatggatcgcattcttctgtataaggaatatgagcggtgccgtcaaaaacatagtcggtagacacctgaatcatcgccgcaccattaaactgcgctgcacatgccagcgttttaggagcttcactgttcagcttgtaagccagttccgaatcatcttccgctttatctactgctgtatatgccgcacaattaacaataagctcaatccgcttttcagcaatatatgcccaaacagcgtccttattacagatgtccagctcctgcacatctgtgaaataatacgtatgttgcggattctcttttgcaagaacttgcatttcattgccaagctgaccattggcacccgtcactaaaattctcatttattcatcaagttttaattcccctttcaggtctttatcgtaatagtttgccaacatggaaagaaagctgctgatagcttctaccgccttcatagtcccctcgctgacaggctttttctgcagacgaagcaaaagtagtccatagagtgcttcgaagcaagtctccagttccggctcttcttttttgccattcttattccgcagttctacaataaacggcaatgctttgaaataagcggcactgtagaaaggaaatttgggagaagaagtcaacgcattatgaagctctgtcagattgatgatgatgttcctgttaatctgcaaatgacctttttcacgtaccccctcctcattcatcatagtgatcaggttgccgtaccactctcgcagggcaggacgctgatcttccggataacgggcgatcacattcgcctcgatctcctccagttcgccatgattggcgcggatcaggtcttcttcttgccacatatatataaggtactcggcaatgtttttctctttaagctgtctggctatctgattcataagttttcttcttaataaagtgactctcccagcaacgtatagattaatcccgccactgacaccagcatcacaatgctgccaatcacacggttcagtatccagatgccccgtaagttaaacttagtgcgcactttattcacaaaataagtgattccgagccaccacaccagcgcccccgaagcaatggcaagatatcccgtaatttcttcgaacaccacgacaccgggctgcacaaaggcaaaacgggcaaatagtccgataaacaggaatataatcaggggattggagagcgtgacaaagaatgcggtaatgaaattgtgaaagtaagaacctttgttggacgatgccggacggatggattgtaccggattgctgcgaaaggtatagattccgaaaagcagcagcatgatgctgcccagcaactgcagataaaaaatattcttattgatataatcgaacacaaagctcataccataacctgtcaacagagcataagctatgtcgcttaatgaggctccaagccctgtcacaaatccataccagcgccctttattcagcgtcctctgaatgcagagaacccccaccggtccgagaggtgcggacacaacaacgcctataataaagcctttcactattatatcgaatattgtttcaatctgaatcatgccgcaaatatcgcacttttttatgagaagaggataggatattaacgttttttccacacaagagtcactatatacaccaaaattgcttatctttgcgccacagaaaaatcgtaaaatcaaaaaataaacatgattctttttttcagaaccccttccaagagcgtgattgccgtagagagcaaccatcagctcaccccggacgaaagtaataaactctgctggctttttggagaagccgtgacggaaagtgaagaaaacctgaaaggctgtttcgtcggcccacgccgcgaaatgattaccccttggagtacaaacgcagtagaaatcacccaaaacatgggacttgaagacattctccgcatcgaggaatattttccggtaaaagatgaaaatgccgactacgacccgatgctgcaacgcatgtacaaaggactcgaccaaaacgtattcaccaccaaccgccaaccggaacctatcgtatccatcgaagacctcgaagcctacaacgagaaagaaggcctcgcactctcgaaagaagaaatggactatctgaaaaaggtagaaaacgatctgggacgcaagttgactgactccgaagttttcggtttcgcacagatcaactccgaacactgtcgccacaaaatattcggtggaacattcatcatcgacggtgtagaacaggaatcgtctctgttccagatgatcaaaaagaccacacaggagaatccgaataaaatcatctctgcttataaagacaacgtagccttcgccgaaggtccggtagttgaacagtttgctccggcagatcactcaaaacctgacttcttccaggtgaaagacatcaaaagcgtcatctcactgaaagcagaaactcataacttcccgacgactgtagaaccgttcaacggcgcatctaccggtacaggcggtgaaatccgcgaccgtatgggtggtggcaagggctcatggccgatcgcaggtactgctgtctacatgacttcttatccccgcacggacgaaggccgcgaatgggaagatattcttccggtacgcaaatggctgtaccagactccggaacagattctgatcaaggcatccaacggtgcttccgacttcggtaacaagttcggccaaccgctgatctgcggctcggtactgactttcgaacacacggaaaacaacgaagtttatggctacgacaaagttatcatgcttgcgggcggtgtaggctacggcacacaacgcgactgcctcaaaggtactccggaagcaggaaacaaagtagtcgtcatcggtggcgacaattaccgtatcggactgggtggcggttccgtatcttctgtagataccggtcgttacagcagcggtattgaactgaatgccgtacaacgtgccaacgccgaaatgcagaaacgtgccaacaacgtagtacgcgcactctgcgaggaagatgtgaatccggtcgtttctatccacgaccacggttcggcaggtcacgtaaactgtctgtcggaattggtggaagaatgtggcggtctgatcgacatgagcaaacttccgatcggcgacaagacattgtccgctaaagaaatcatcgccaacgaaagtcaggaacgtatgggacttctgatcaaagaagaagccatcgaacatgtacgtaagattgccgaacgcgaacgcgctccgatgtacgtagtaggtgaaacaaccggcgatcaccgcttctctttccagcaggcagacggtgtacgtccgttcgacctggccgttgagcagatgttcggttcatctccgaagacttatatgatcgacaagaccgtagaacgtcattatgaaatgccggaatacgaattgccgaaattacatgaatacctgaccaatgtgctgcaactcgaagccgtagcttgtaaggactggctgacaaataaggtagaccgctccgtaacgggtaaagtagcccgccagcaatgccagggcgaacttcagttgccgttgagcgactgtggtgtcgtagcacttgactatcgtggtgaaaaaggtatcgccacttctatcggtcacgctccgcaagccgcactggctgatccggctgccggctctatcctttcggtatccgaagcactgacaaaccttgtctgggctccgatggcagaaggcatggacagcatttccctgtctgccaactggatgtggccgtgccgctcacaggaaggtgaagacgcccgtctttacactgccgtgaaagcattgagcgacttctgctgcgctctgcaaatcaatgttcctaccggaaaagactctttgtccatgacacagaaatatccgaacggcgagaaagtgatttctccgggaacagtgatcgtatctgccggcggcgaagtatccgacgtgaagaaagtcgtatctccggtattggtgaacaacgaaaagacaacactctatcatatcgatttcagcttcgacgaactgaaactcggaggttccgcttttgcacagtctctgggtaaagttggcgacgacgtaccctgcgtacaggatgccgaatacttccgcgatgctttccttgccgtacaggaactggtgaacaagggactgatcctggcaggacacgatatttcagcaggtggtctgatcactacattactggaaatgtgcttcgccaacgttgaaggcggtatggaaatcagcctcgacaagatgaaggaacaagatatcatcaagattctgtttgcagaaaatccgggtatcgtgatccagatcagcgacaagcataaagaagaagtgaaaaagattctggaagatgcaggcgtaggattcgtgaaactgggtaaaccgaccgacgaacgtcatatcttggtatcgaagggcgacgctacttatcagttcggtgttgactacatgcgtgacgtatggtattcttcttcttacctgctcgaccgcaaacagtctatgaacggctgcgcaaagaaacgtttcgaaaactacaagatgcaaccggttgaattcgctttcatgcccggattcaaaggtaaactctctcagtatggtatcactccggaccgtcgtactccgagcggtgtccgcgctgccatcatccgcgagaaaggaacgaacggcgaacgcgaaatggcttactcactctatcttgccggcttcgacgtgaaagacgtgacgatgaccgacctgatcagcggacgcgaaacactggaagatgtaaacatgattgtttactgcggtggattctccaactccgacgtactcggttcggccaaaggatgggcaggaggtttcttgttcaaccctaaagccaaagaggcacttgacaagttctacgcacgtgaagatacgctttcactgggtatctgcaacggttgccagttgatgatggaactgggacttatcaatccggaacacgaaaagaaaggcaagatgctgcacaacgactcacataaattcgaatcgacttatgtaggcttgacaatcccgaccaaccgcagtgtaatgttcggctcattgagcggcagcaaactgggtatctgggtggctcacggagaaggtaaattctctctgccttacgatgaagaccaatacaacgtagtggcaaaatacagctacgatgaataccccggcaacccgaacggttccgattattctatcgcaggtcttgccagcgccgacggccgccatctggcaatgatgcctcacctcgaacgtgctatcttcccgtggcagaatggctgctatcctgctgaccgtaagaacagcgatcagattactccatggatagaagcatttgtcaatgcccgcaaatgggtagaagagaagactaaataagatatctttctatcattgaaacggaggctgttatttgttataaagtaacagcctcttgttttaactccttttccatacccaaagtctgcatattacaacttaatttccctaaataaacaggatatacaaatagctgcgaaagctcctgtatacttcactttgagagcaccgttatcttaacctaaaattttgtagtgtcgaaaaatcttcttaattttgtcaaactttccccctcactaaagattcaataacccataaaagtcctatttgtatgaaaaaatggctttttttattattattgtttcctctgacctgtgtcgcccagacctatcagtatctaggagtggaagacgggttaagcaaccggagagtgtactacattcaaaaagacaatgttggatatatgtggttccttacgcacgagggaatcgaccggtacaacggcaaagagtttaaacggtataaattaatggacggcgacaaagaactcaactcgctgttaaatctgaattggttatatatcgatccggaaggaacgctatgggaaatcggtaagaaaggcaagattttccggtatgaccgtattcatgacactttcgaactcgtctacaagttgccgatagaagactttaaggatttaccggctcccatcactttcagctggatcgatcataacaatcatatctggctgtgcaacgaagaaacgatcttcctttacaacacccggacggaagaggttactcatgttaaaaactgcctcagcgaagctataaacgacatcgaacaaatcgacgaatcccactattttatcgggacggagatgggtattcatcatgcccaactgaaagacaacacactacaacttctcccctgcgacaagctcgacaacgtcaatattcaagttaacgatttacacttcgaccccaaaatccgcaaactgttcatcggtgccttccaacggggcgtcatggtttacgacatgaacacaaaaaccatcacacaaccggaagtcagcctgaaagacgtaagtatatcacgcatcaaaccactgaatgccaaagaactgctgattgctaccgatggcggaggtatctataagatgaatgtcgatacgtaccagaccgtaccttttatcgtagcagactacaacagctacaatggcatgaacggcaacagcattaacgacatctacatagacgacgaagaacggatatggatggcaaactatccgataggaattaccattcagaacaatcgttatccgagttataaatggatcaaacattctgtcggtaataagcagtcgctgattaacgaccaggtgaactctatcatagaagacagcgagggagacttatggtatggcaccaacaacggaattagcctgcaagactcaaaaaccggaaaatggcgctcgtttctgagcacctttgagaatgtacagaacagcaaaaatcatatatttacaaccttatgtgaagtatctcccggcattatttgggcaggcggatatttctcgggactttatcagatagataaacgtacgtcgaaaacaacttattttacccccgcttcgtatgctcatgaaagtatacgtccggataaatacatacgtgacatacgcaaagattcacgcggttatgtatggagcggaggatattataacctgaagcgaatcaacgtacagaccaaagacatacggctctaccacggactgcattccgtaaccgccatcatcgaaaaggatgacaaaagtatgtggataggtacggcaacaggcctgtttcttctggatatagaatccgggaaatatgaacgcatccaactgccggtagaatctacctatgtctactccctgtatcagacccaaaaaggcgcactgtatataggtaccagcggatcgggagtactgatttatgatccccagacaaagttgtttacccattattatacgggaaactgtgccatgatatccaacaatatctacacgatattatcggatgaagacaatgaaattctattaagtacggagaacggactcaccagcttctatcccaaacaaaaaaccttctacaactggacaaaggaaatgggactgatgactacgcacttcaatgcgttgtccggtaccctgcgcagaaataataattttattttcggtagctcggacggtgccatagagttcaataaagacatgaagctccccaggacgtactcttccaagatgatcttcagtgatttcaaactgttttatcagacggtatatccgggagacaagaattcaccactggaaaaagatatcaacgaaaccaaagaattaagactaaaatataatcagaatatcttttcactgatggtttcttccatcaactatgattatccttccaatgttctttattcatggaagctggaaggattttacgaagagtggagcaaacccggcaatgaaagtacaatccgttataccaacctcgctccgggaaaatatgtattgcgtgtgcgtgccatctccaacgaagaccaacgggtgatgcttgaagaaagaagcattgatattatcattgcccaacctttctggctcactccctgggcaatgatattgtatgcaatcctgatttccctcattgctgttatcatcctgcgggttcttattctgaaaaaacagcggaaggtttccgatgaaaaaatacacttcttcatcaatacggcacacgatatacgcaccccgttgacattgattaaagctcctctggaagatttgcgcgaaaaagaagctctgagcaaggaaggcatagccaacatgaacactgccatacgcaatgtaaatgccttgttgcgtctgacaacgaatcttatcaactttgagagagcagatgtttattcttcggaattatacatttcggagcatgagctaaacacgttcatgacagaaatattcaatgcatttcagccttatgccaatatcaagcatatcaactttacgtacgaaagcaatttccggtatatgaatgtatggtttgacaaggaaaagatggaatctattctgaagaatataatatcgaacgcattaaaatacacgccggaaaatggtaatgtgcagattttcgtatcagagaacaatgattcgtggagcgtggaagtgaaggataccggaatcggtattccagccagcgagcaaaagaaactgttcaagcttcatttccgtggcagcaatgccatcaattcgaaagtgacgggaagcggtatcggtttgatgctggtatggaaacttgtccggttacacaagggcaaaatcaacctgtcgagcgtggagaatcagggatcggtgattaagatatctttcccaaaagacagcaaacgcttccataaagcacaccttgccacaccaagcaaacgccggcaagagataacaagtacaaccaatgtgcctgccagcatctatgagaatgtgcataaggaacagaatccgaatcatcagcgaatcctaatcgtagaagataatgatgaactgcgcaactatctgtcacagacactggcagaagaatatacggtacagaactgctgcaacggcaaagaagcactgaccatcattccggaatacaaaccggaactggttatctcggacattatgatgccggaaatgagaggggatgaattgtgtgacgccatcaaaaataatatcgagacgtcgcatattcctgttatcctgctaacagctcttaataatgaaaaagacatattgtccggccttcagattggtgctgacgagtatattgtcaagccatttaatattggaatattaaaagctaccgtctccaatctgttgatcaaccgcgcccttttgcgaagcaaatacggtagtctggatatggacgatgaggatgatcatgaagacgaatgcatcaactgctcgcaggatatcgactggaagtttatcgccaatgtacggaagaatatagaagataatatagacaatccggctcttacagtagatgtgctttgcaatctgatgggcatgagccgtaccagcttctacaacaaactcagggcattgaccgatcaggctccgggcgattacatccgcctgatccgcctgaaacgttcggtgaagttgctgaaagaaggtacacacagtataacagaaatagcagaaatgacaggatttagtgatgcgaagtacttccgcgaagtattcaagaagcacttcaacgtaagccccagccaatacggaaaagaaggtaagccccacaaggagggcaaggctggaaaagaaaacaagtccggtaaggaaggaggagaaaaggaagaatgagcatttacctcgaatcatttgaaatcttttttaaaataggcgccttcaccattggcggaggctatgcaatggttccacttattgagaatgaaatcgtaaccaaacggaaatggatcgcacaggaagactttatcgatctgctggctatctctcagtccgctccgggcattctggcagtgaatatctctatctttataggatataagctgcgtggcatccggggaagtattgtcacggcactggggactatactcccctcatttatcatcattctggccatcgcgctctttttccattctttcaaggataatccgattgtagaacgtatatttaaaggaatacgtcccgctgtggtggcattgatcgccgcaccgactttcaccatgggacggtcggccaaaatcaaccggtacaacttatggattcccgtcgtatcggcattattgatctggctattgggcttctccccgatctggattatcattgctgccggtgtaggaggtttcctatggggaaaatttaaaaaagtggagagtgaacacccaaggctatgattcaagattcataattctaagttaaaaagagatgatttatcttcagttattttatacgttctttaaaatcggacttttcggttttggcggaggttacgccatgctttcgatgatacaaggtgaagtagtaacccgttatgggtgggtgacttcgcaagaattcacagacattgttgccatcagtcagatgactccgggtcctatcggtatcaatgcggctacttatgtcggttttacgtcgacaggaagtgtatggggatcagttgttgctacattcgccgttgtttttccctctttcatactgatgctgacaatcagcaaattctttctgaaatatcagaaacatccggtagtggaatctatttttgcaggactgcgtccggcagttgtcggattattagcttccgccgcactggtattaatgaatgtggaaaacttcggttcacctacagaagacacctacacatttgtcatcagcatcattatcttcctgatagcctttatcggcaccagaaaatacaaggcaaatccgatattaatgattatcgcctgcgggattgcaggactactgctttattaaaataaagcaataagaggctgactaaaaagtcagtagtatcttaaatctcctccttcgagaaggaggagtacccgcagggggaggtggtaggtgaacatgcagtccttacagcttgaccttcttacttaccgattttgactcattatgaatacggtctaaagccgtcaccacatagcggtatttggtcttacccgtttcatacggcagtttgtagaaaggatttcgggtgatagctacgatatgtgacggatcatcaagattcaccttttctttgggaccgaaacggtatactacgtactgaatagctttgtccatttcagtctccgctttcggagcagtccagaaaagtatatagccatcttctgtccatacctttttcatcttacgtactttgcccggagctttatcatccataaagtcgaataccggaatcaaagccggatatttatgatactcctgtaccaaagcatcccgatattttccagcgttctcgactacggctgccgcataccattggcaacttccgccgatagtctgataagaacgctgcaaagccatctttcgtggaagctggttgatagaaggattcttcggatcggcatgctgaatggtattcatgactgcctgaccgataaacaacggacggttttccgcatgcttcgcccaccagtcaaccagtgtttcgtaatcggctgccttgtgtcctatctcccaataaatctgaggaatgttataatcaatccatccttcacgtgcccaaagcaatacgtcggcataaagatcatcatagttctgcaaaccatttgtgttgctgcccaatggatctgttttctgattgcggtaaataccgaacgggctaataccgaacttcacccacggtttgatgccccgtatcgtttcatgaagtttcttgatcaggatattcacgttgccacgacgccagtccgccttattgctgaaaccgcctccgtaacgggcaaagctcgcattgtccgggaaatcgactcccttgatcggataaggatagaaataatcgtccatgtggatagcatctacatcgtaacgggatacaatatcggaaacaatcttgcagatatgctcacggctttcgggaagtgccggatcaaaatagatctgatcgccataagtgacaaaccattccggatgttcatgataaatatgtgtcggtgccagttgattcttcaatgaagtcttcacacggtagggattgatccatgcatggaattccatattccgtttatggcattcttcgatcatgaattgcatcgggtcccacatcggggaaggcatttgcccttgtgttcctgtcaggaaacgactccacggttcgtgttgtgaagcatacaatgcatccgcttcgggacgcacttgaaagatgatcgcattaatacccgctccctgaagagagttcagctgaccgaccagtgtctgtttcagtttctctgtcggtatgccacggaactgtccgttgacagcctgtatccatgcagcacgaaactcacgtttaggatatgcattgcccgatggcgcctgcgctcttactcctgccaccagaagcagaactaataagaaaagatagtttttcagattcataatgttcttgagtcataaaataatgtggtgcaaagataatagatgcagatactatctccaactattattgaggccattcgacaacaaatcttgcaccacccgcgtagttggtgtccagatagacatttccatccactaattccatgatctgacggataatagacaatcccagtccggtgccctgagtgaaggcatcgaccttcgcgaaccgttcgaaaatggagtcccggtagttttcatcgattccgggaccggaatcttcgataataaaacgtaccagacgattcggtttgtcttctgcataactgagacgtataaagccggattccgtgaatttattggcattgttcagcaaaccgagcagcacacgcttcatccaaatttcaaccgtacacacttcgaccggagtggaagaaggcatatattgtaactcgattccctctttcagattctgacgaatcaatcctaaacattcctgacaacacgcatctacactcactggcttcttcggtatatcatccgtctgagagtccatgtcggctatatcaatcacattatttaccaaatcaagcagatatgcgttgctgctctccatctgacgggcatattcttccatctcttcctgtgtcagcccaccggcagccatcaaggatgaaaaaccgataatcgaattgagcggagtacggatttcatgtgtgatatgctggataaaagagcttttcatatggctggccttgataacggccttatttgccgcatccagtttccggttcaacgacaaagaacgcatatagtagaacgtgataacaatcaacaatatcaacaccaggcatccgacaatcacggaagttataaagagattgcggttgacctccgcccgcagttccagcttatcatgttctagcttgtctacttcgaactgcacggtatatttgcttaattgctcgtccagctctgccgaacgaatggaatcattaatatgtgcataagatttataaacctcgcaggcatcttcaaagcgtcccatctgctccataaactgggctttcaacaggtgattggcaggataacagctccccaccgaatgatgataatccatcaatgagtccagatagttgagtgccatctgattgtcattcaacgtccgggcacaaagaattttatatcccaaccatccttcacggggaaaagcatttatattttcgtgataaaacttatccgtttctgcaataaacggctgcgcctccttcttccctttcaatgccaacgtagcaatcacttgaaactgataataacgcatggtaagctctggtcggacagggatatccttacgcttcattttctcaatcagtcccggcatgcagttcaagtattctatcgcattggtatactcccctctagccagatgagtctggataatattcagtgacaccacgtaggcatcttcataaaaacctgcatcgctaaaatgtttcagtgcggaagaatagtattcgagacagagcttgacgttgttactgaacacccgatgattatatccgatacacatttcgctgcaagccattccgaaagcactcttggccgcatccgcatctttctgaagaagttctgtctcacgcatggcctcatcctgcaaccccttctcggtaagcaactgaatatactggcgccactgtgtatagcgattattaacattaccatgtttcagacaccagtccatatattcatatgcaaccaccttcaggctatctgtattcctcaaccgataataatgggaagtaatcagagaataagcatcgtcgattctggcagtatcgttctgctgccttgccaatcgcatatactcctgatagaaaggtatgaaatctttctgacctattttttttgagatgctgtcggaaaggacttccaactgttgttctttgtttgtgctactaaaggctaaagtagatgcaaaacacagaatgaataagctaataaccatccggatgtttttcacgattcaagtcaatttgttgttattttgaaatgtttgttgtaaatgctggaccaagatacgccaattatcccgaagcgatttctttttattactaattataacatatcttaacccggtcaaaaacctttcttctaccaataaaatcgctaactttgccaactatcataaaaaaggagtattttatgtcagaaaacaaacatatttcgatcaaaggagcgcgggttaacaacctgaaaaacatcgatgtagatattccacgcaacaagcttgtcgtgatcaccggactatccggttcggggaaatcgtcgctcgcttttgacactctctatgcagaaggacaacgtcgttatgtagaaagtcttagcagctacgcacgccagtttctgggacgaatgagcaaacccgaatgtgattttattaaaggaatcccaccggcaatcgccatcgaacagaaagtgaacagccgtaatccgagatctaccgtaggaacttccaccgagatttatgaatatctgcgcttgctttatgcgcgggtgggacggacatatagccccgtcagcggagaagaagtcaagaagcattcgacggaggatatcgtcaactgtatgctttcgcatccggagggaaccagatataccgtattgacccctatccgcctgcgcgaagaccgtaccctgcaacaacaactggagatagacctgaaacaaggcttcaaccgggtggaagtgaacggtgaaatgaaacgtatcgatgaatacaagccggtggcaggcgacgaagtttatctgctggtagaccgtatggcagtggcaagcacgaaagatgccatcagccgactgacggactctgccgaaaccgccatgtatgaaggtgacggtacgtgtatgctacgtttttatctgccggacggcaccaccaaactatatagtttcagcacgaaattcgaagcggacggcatcacttttgaggagccgaacgatcagatgttctcgttcaactctcctatcggtgcctgccccgtatgcgaaggattcggcaaggtgatcggcattgacgaacatctggtagtgcccaaccgctcgttatccgtgtatgaaggggccatcgtctgctggcgtggcgagaagatgggagaatggaaagatgaactgattcataatgcggataagttcgatttcccgattttcaccccttactatgagctgacagacgagcaacgtcgcacactttgggaaggaaaccaatacttccacggcatcaacgatttcttcaagatgctggaagagaatcaatataagatacagtacagggtaatgctggcacgctaccgtggaaaaacaatctgtccgaaatgtcacggtacacgtttgaaaccggaggcaggatatgtgcgggtagacggaaagagcatttccgaactggtggatttacccatcactgaactaaaagagttcttcgaccatctgaacctcaacgaacacgacagcaatgtagcccgcagaattctgattgaaatcaacagccgcatccgctttctgatagatgtagggttgggatatctgactttaaaccggctcagcaactcactgtcgggtggagaaagccagcgtatcaatctggcaacgtcattaggaagcagcctcgtcggcagtctctatattctggatgagccgagtattggtttgcacagccgtgacaccgaccgtctgatccgcgtattgcgtcaattgcaggaactcggaaacacagtggtagtggtagagcacgatgaagaaataatccgtgccgccgattacatcatcgatatcggtccgaatgccggccgcctgggaggagaagtcgtttatcagggcgatatgaaagacctgaaaaaaggcagcaatagtcatacggtacgttatctgttgggagaagaggagattcccgttcccgaacatcgtcggccgtggaacaattatatcgaactgacaggtgcccgcgaaaacaatctgaaaggagtgaatgtaaagttccctctcaatgtgatgacagtagtcacgggtgtttccggttccggtaagagtacgttagtgcgggatatcttctatcgggcactaaaacgcgaactggatgaatgcagcgaccgcccgggagagttctcttctatcggtggaagcctacgtgacttgagaaatatcgaatttgtcgatcaaaacccaataggcaaatcgtcccgttccaatccggtgacttacatcaaggcttatgatgaaatccggaagctatgggcggaacagcctctggcaaaacaaatgggatacacagccggacatttcagttttaacagcgaaggcggacgatgcgaggaatgtaaaggcgaaggaaccatcaccgtagaaatgcagtttatggcagacttggtgctggaatgcgaatcctgtcacggtaaacgttttaaagcagatacactggaggtgaaattccaggataagaacatctatgatgtactggaaatgacagtaaaccaagccgtcgaattcttcaccgaacacggtcagaagaagattgtaaaaagactgcttccgctacaggatgtcggactgggatatatcaaattaggccaatcctcttctaccctatccggtggtgaaaaccaacgtgtaaaactggcattctatctgagtcaggagaaagccgacccgaccctgtttatctttgacgaaccaaccaccggactgcacttccacgacatccgcaaactgctggatgccttcgacgcactcatccgacggggacacagcattgtcatcatcgaacataatatggatgttatcaaatgtgccgattatgtaatcgacctcggaccggaaggcggagacaaaggcggaaatatcgtagcggtaggtacaccggaagaagtagccgcttgcggagcaagctatacggggcagtttctgaaagaaaagcttgcttaatggataatggataattgaaaatggataatggctatgcagtaaacagcgcagctcattatccattttcaattatccattgttagaagtagaatccgaatccaaccttaacgccgaaacgtgacatgtcgctgtcgttgaagcgccatttgtaatatacggcaggttcgatagttacagtgcgggaaaggaagtaagcgtatccggcttcaatgcctagtccccagtcagtctggtgatgtcctccgctccaacggaagcggttccagtcgagacctccgcccagataaacaccggtggaattaaagtagaaacgcattcctgttcctaatgtgtattcgtctacgggttttgaccaatcggcaccgacattaaccatcaatgcgataccgtcggcaaggaatgtaccggcttgcgcaccaataccaaacttcgccttatcgtttttactatacgaaaaatccaatcccgttacagaaggattaagaatcatttttcctttctcaaattgtgcctgggcagctattgataccaccagcagacaaatagctaaagctaatttcttcataaatttacttttttaagtgaatagattgttcgtcttttttacggcgttcacgcatttgttccttcttccggagcacgagccaaagcaagagtacgatgacgtaagaacctaccaccgtaagaatcttctccgtctggccgacttccgtgttgcgaggtaacaaataggctgccgttactgatacataaataaggaatgcgatagcaactcctgtcgatttttttattttcttcattctgatagttttctagttttttgttttcccagccagataaagaaccaggcaatagctaccactacgcatcctataccgatgcagtaggaaactatatgcgagagtcccagcccttcgggagcaatacatatataagtagaacaaacactcgtcataaataaggcggggatcagcgtaatccaataaggctttttggctaccacaaggtagactgtgatagcccagagggtgaacaccgccaatgtctggttggcccaggcaaagtaacgccagatcatgttaaatccgtccgcgtcacgcaagctataaagaagcagaccgatagctactgcgaacatcggaatacaaatgtataaacgacggcgcatacttttttgttccagtcccagaaagtccgccacaatcagacgggcggaacggaaagcggtatctcccgaagtaatgggagccgcaattactccaagaatggcgagcactccaccgatagctcccagccagtctttagtgatagcgtctactatcacggaagcattactttcttccattccattttcatggaagaaataagtagcggctgccgcccatatcaaagcaacgatgccttcggtaatcattgcaccatagaaaaccggacgtccatgacgttctgaagtcatgcagcgggccattaaaggactctgcgtggcatggaaaccggatatggcaccacaggcgatactcacaaacataatcgggaagatcggcagttcactggcatccggattggtattctgcaagccgtcccatagttcgggcaaaacagggtgattgacataaagcattaccaggataccgactgccataaacagcaaggctactgcaaacaacggatatattttaccgatgatcttatcgaccggaagcagggtagccagaatataatataggaagaccacgacaatccaaaaagtagcgtccagactttccggagtcagcttggccaatagtccggcaggtccggctacgaagacggaaccgacgagaatcatcagaagaacagtaaatccacgcattatctgtttggtagtcagtcccagataacggcctatgatttcgggaagactctctcccccatgacgtaaagaaagcattccggcaaagtaatcatgaacagcgcctgcaaaaatacttcccaatacaatccataaataagaagaagtaccgaacttcgctcccataatcgcaccgaatatcggacccagtccggcgatattaaggaattgaatcatgaatattttccaagtaggcaacggaatatagtctactccgtcggctttggtaagagccggtgttttacggtcgtccggaccaaagacgcgctccatcaggcgtccatacgtgaaatagcctgctatcaacgccagcaggcacagggtaaatgtaatcatggcgtgttgttttttaactgtcgcaaatgtaacataatctcacgaaacagcccaacaataccgacacttttgctaactttgcagggatttaaaacaaaaaataaagaatatgcaccgaactattttcattctttcacttttgtttcttgttcttccggcaaaggttcagatacaacctcctttcttttcaatgctaatatagataatccaatatatacaccaaggtctgaattactgcttcttcatttcatcagctgtcacgattttccatttatccaagtcttcaatttggccgcttctattgcctaccacctctgtgctgttggcagaagacaaaccaattcttgcttcaggagacagccccaatgaataatagccttcatcatccgtaggtgtcaggaacaatgcatatttaggatcatgcactcgccagtcatcacccggcttacccacaatcactttatctccattattcattacatgaaggttggtcgctatatttctgacacggaggatatgatacgtcaaattctcgatacaaaacaactgggacttcttttccgaatcatattttgcggcagaaatcactttcgaatccggattacaatccagtaccataccggttgccttgtttaccaaatagacctgagatacattatcggttacataaggcatatatttttccttgatagttactgatttcagtttggcatcctgtcctctccattgtacagtcactttatgtttgccttttatccgacggtcgaaaagagcagattgtgtagtgaaattcttagagtcggcacccgaaacatcaaccgaggcaaaaggaattgtttcagtatccagatagaaatccaagtatcccgatttctttttattcaattgcacgtcaacctctactttctcatacgtaggcaatgagccaaaatgtacatcgaatgacaatctcgtaccgttcttcgctttttcaatagcaccattcttcatcttcgccttcgaacccgaaagagaaatatccgaagcagccactgttatcccaccggggttcataacgaattcacccgttatcgccttatacacttccttcgctataatataatgccctctatggtcgggatgcacccaatcgttgccacccggcataaattccggatgtcccttcaagggattatacagatctacacagaccagattaagttcctccgcaatctctcttacggcaggctgaatataattctttgctacattgtcatcaaatgaaccaagaaatcccccatcgccataatacatcggcggaggcgtacaaatataaatatccggtttagtcgaaagagcctggaatttagcgatcaacttcttatagtctgctttaaaagtctctttaccatatttttcgaaattcttcttgttggcatcatttgcaccaaacttaataatgacaatattaggtttatactcaagtgccgctgcgcattgctcagaattaatgtaagcgaattgatattcattaggattttcgggagtagtcgcatcttctcttaattttataaataccccggaagagcctttaccaaatttggtaacttcataatcatcaccgagcatttcagccagaggcatcgcgtaataaccataatcattcgttcccccggtgatactgtttccaacagtagcaactctaatctttcccgtctgggcagtcagactcgccgcaaacaaaagacagagcgacacagatagtagctttttcattgtttattatcttgttatattaatattttatatttcgtaccttattaaaagacggctaagaatgcagataccactaaaagagaatcagtaattttctgtcaaatagcattaaataaaaaaggaataatcaatttacagacatttttgctagctttgcagagatttagcatctaaaagggaataatatgcaccgaactattttcattctttcacttttgtttcttatccttccggctaaggcgcaacccaagcacgaagttcgtgcagcatggattacggctgtatatggtctggactggccccgtacacgggccacgactcctcagggcatccgcaagcaaaaggaagaattggtggatatccttgataaactgaaagctgccaacttcaatactgtcctgtttcagacccgtacacgcggagatgtgctgtatccttcttccatcgaaccgttcaattctatcctgaccggaaaagtcggaggaaatccgggatatgatccgttggcttttgcgattggggaatgccacaagcgggggatggaatgtcatgcgtggatggtgactattccgctaggcaacaaaaagcacgtcgcttctctcggcaaacaatctgtcaccaagcgagtgaaagatatatgcgtgccttataaaaatgaatatttccttaatccggggcatcctgctacgaaagagtatctcatgagactcgttcgtgaagtggtggagcgctatgatatagacggagtgcatttcgactacctgcgctatccggagaatgctcctctattccccgacaaatacgatttccgccgttacagcaaaggacgtactttggatcaatggcgacgggataacatttccgaaatcgtccggtacatatataaaggtgtgaaagcaatgaagccgtgggtaaaggtaagtacttgccctgtaggaaaatacagagatacttcccgctattcttcccgtggttggaatgcgttctataccgtttatcaagacccgcaaggatggctcggagaaggtattcaggatcagatatatcccatgatgtattttcagggaaacagtttctatcctttcgcgctcgactggcaggaacagagcaacggacgacaggttattccggggctgggcatctatttcctccatcccgacgaagggaagtggacacgcgacgaagtggatcgtcagattaatttcatccgtaatcagaaaatggcaggagaagggcattaccgtgtcaagtatctgatggacaatactcagggaatttatgacgaactgattgagaacttctatgcctatccggcattacagcccccgatgacatggttggataacgttccgccgtctgccccctcagcactcaaagttacgtccatcgacaacggatataccgaattgaactggcaaccagcgacggataatgaccaacggaataaaccgatgtacgtgatttatgcttccaatgaatatccggtagatacaaagaaagcggaaaatattgtcgcacaaagtattcgtgaaacaagttacatttatgcacccatccagccttggaatgccaagaagtattttgcagtaacggctatcgaccgttgcgggaatgagagtgcacccataaatggagataagtaggcatttcagacagtattaccacaatatgacttttccgatgttcaccaattccaatttagcagtatcttcaaagagtttccattgcttgaaaccagagtttcatcggtgtgaaactgtagtttcatcggtgagaaactagagtttcatacgcttgaaactttagttccaaacgctcgaaactatctgaaactactgttgatttgattgacttaaccgcatgttccaatcacattgaacgcatcagctacttcaatagtactgctctctctgaaaacattaaatcatatatcagtcaataatacataaattatcagtccttaatacttgatttctcaattattaatatctgagaaatcaaacgttaacagttgagatatcagatattaacatcctgtaaatcaaagaatagcacagtaaaaacggtatttatcaggacgatgcagagtgagagcaagtccttgctctcactctgctaccactggatctctaacagctaaaacatcgatgaataaagggatacagacgaactgttagagcatgagagcaaaagcactatctttttcactgggggagagtaagcaaaagaaacgcacgataccggctttgaggcgtcaccggtactaacggcaaatatccggcacacacccgattattctctacggacaaagggaacgaagccgacatctgccgatgttcctccaaagcctgaccggctaaaggataataatcaatccgaaaaactccttccgcatccgcagccaaataacgatccgtcaagagccatgccaccacccccatattcattcgcagattaatttcgacacaaggatgaatccggtaaacaggcgcttcatccggaaaatgacaaatcatcatatccactcccaagtatccatgataaaagccaccgaacaaagctgacaattcttcttccaaacgagtccgcagcctgataaattcttcttgtggcacataagccgatagtttctgcagaatcttctcgtcagacagcaagtcattccctgcatacatcccactcccacccgtgtggaagaccgaatatccggcaaaaacaacccttcctctcccgtcagcataaaactccatagcgaaatcttccaccttattatatataggttcgcctaccaccccaccctgagaagcagcgacacgggcacaccaaccggaaataaaagtagtaaatatgcctttacaccaattcaatcctttcccgcttccggaaagcggagcttttaacaagcacgcttcccgcccttcgacgaacgcactgcactccgccaaagtactcaaataaaaagattctccacagaagtattcattcaaccgcaacccaggcaacaactttaccgcctgcagacgatgcgaatgctctctcagaatattcatataatccgcagaaggcagctccgtctgacctgcccccaatgtcatcaaacgcttccgcaaagcagggtcccaaccccacggagagaacttccagtctttaccgtcagccacttccggttccgtcaacaaggccacatccatgcccaaaagttcactctttgttttcaggaagtccgcattataagcagacggtgcaagcaccgcacttcccgcttcggcataccacataggaagcaacgccaggtcactcgccatctgtcgggcggaagccggcgccatatagttcgtctcaccgcttgccaacgccatatcatgctccggattgaatatataaacaggtcttttcgtcatgtcaaagatggattcaacacattattctgcaaatatatacaggaaataatcaggaacttacacaataaagagaaacttataaattaaagcacatttttgctatctctactttgcaaatcctaaaaaaagcactatatttgccagccgaaaaacaaagaaacgaaatggaatcattctatcgcacacacgcctacctcgttgagcacaccaatgcccccgttcgccgcgatcttatggacgagatcgactggagtgaccgtctgattggtatcaaagggacacgtggcgtaggaaaaaccactttcctcctgcagtacgccaaagagaaattcggcaccgaccgttcctgtctgttcatcaatatgaacaacttttatttctccggtcacagccttgttgacttcgccaacgagtttcagaaacgtggcggaaaagtactgctgatcgaccaggtgttcaaacatcccgaatggagcaaagagctacgaatgtgctatgaccgtttccccagcctgaagattgtcttcaccggttcttccgtcatgcgactcaaagaggaaaacctcgaattgcgtgacattgcgaaaagttataacctgcgcggattctctttccgtgaatttctgaacctgcagacaggaatgaaattccgggcatacagcctcgaagaaatcctcagtacacatgaacagatagccaaaggagtactttccaaagtacgaccgctggattattttcaggattacctgcatcatggtttctaccctttcttccttgaaaaacgtaatttctcggagaatctgctgaaaacaatgaacatgatggtagaagtggatatcttgctgatcaaacaaattgagctgaaatatctttcaaagataaaaaaattactatatttgttggctgtggacggaccgaaagctccgaacgtgagccaactggcaagtgacgtacagacatcccgcgctacggtaatgaactatatcaagtatctggcagacgcgcgtctgattaatctggtttacccgaaaggagaagaattcccaaagaaaccgtcaaagattatgatgcacaactctaacctgatgtactccatttatccggtgaaagtggaagaacaggatgtactcgacacgttcttcgttaacactttatggaaagaccataaggtacataaaggagataaaaacgtctctttcatggtagacgaagtgatgccgttcaaaatttgtgcggaaggtacaaaaataaagaataacccggacgtgacgtatgcgttgcaaaaggctgagataggccgcggcaaccaaatacctctttggatgttcggattcttatactaaaaagatttatttacttaaatatttaatttagttatgactaaacagaagaaattcatcacatgtgatggtaaccaagctgcagcacatatctcgtatatgttctctgaagtagcagctatctaccccatcactccttcttcgactatggctgagtacgtagacgaatgggctgccgcaggacgtaagaacatcttcggcgaaacagtattggtacaggaaatgcaatctgaaggtggtgctgccggtgcagttcacggttctcttcaggctggtgcattgactactacttacactgcttctcagggtcttcttttgatgatccctaacatgtacaagattgccggtgaattcttgccttgtgtattccacgtttctgctcgtacactggcttctcacgcattgtgtatcttcggtgaccatcaggacgtaatgtcagctcgtcaaaccggcttcgctatgttggcagaaggttctgtacaggaagttatggatttggcaggtgttgctcatctggctactatcaaatcacgcgttccgttcatgaacttcttcgatggtttccgtacttctcacgaaatccagaagatcgaaatgttggaaaacgacgacctcgctccgctgatcgaccaggaagctttggctgaattccgtgcccgtgcactgaatccgatgaagccggttgcccgtggtatggctgaaaaccccgaccacttcttccaacatcgtgaatcatgcaataactactatgaagcagttcctgctatcgtagaagaatacatgaacgaaatttccaagatcacaggccgcaaatacggtttgttcgattactacggtgcagaagatgcagaacgcgtaattatcgcaatgggttctgtaactgaagctgcccgcgaagctatcgaccacttggtagcaaacggcgaaaaagtaggtatggttgccgtacacttgtatcgtccgttctctgctaaacacttcctggctgctgtacccaagactgcaaagagcatcgcagtgcttgaccgtacaaaagaaccgggtgctaacggcgaacctctttaccttgacgttaaagactgcttctatggcgcagaaaatgctcctgttatcgttggcggtcgctacggtctgggttcaaaagataccactccggcacagatcatctctgtattcgaaaacttggctatgccaatgccgaagaaccacttcactatcggtatcgtagacgacgttacgttcacttctcttcctcagaaagaagaaatcgctctgggcggtgaaggtatgttcgaagctaaattctacggtctgggtgctgacggtacagtaggtgccaacaagaactctgttaagattatcggtgacaacaccgacaaacactgtcaggcttacttctcttacgactccaagaagtcgggtggtttcacttgttctcacttgcgtttcggtgatactccgatccgttctacttacttggtaaatactccgaacttcgttgcttgtcacgttcaggcttacctgcacatgtacgacgtaacacgtggtttgcgtaagaacggttctttcttgctgaacaccatctgggaaggcgaagaactggctaagaacctgcctaacaaggtgaagaaatactttgcacagaacaacatctctgtatactatatcaacgcaactcagattgcaatggaaattggtttgggcaaccgtaccaatacaatccttcagtctgcattcttccgtatcacaggcgtaatccctgtagatcaagctgttgaacagatgaagaaattcatcgttaagtcttacggcaagaagggtgaagacgttgttaacaagaactacgctgctgtagaccgcggtggtgaatacaagactctgactgtcgatcctgcttgggctaacctgccggatgatgcaaaagcagaaaacaatgatcctgctttcatcaacgaagtagttcgtccgatcaatgcacaggacggtgacttgctgccggtatctgcattcaagggtatcgaagacggtacttggtatcaaggtacttccaaatacgaaaaacgtggtgtagctgcattcgttcccgaatggaatgctgaaaactgtattcagtgtaacaagtgtgcatacgtttgtcctcacgcttctatccgtccgttcgtactcgatgctgaagagcagaagggtgctaacttcgagcaactgaaagctgtaggtaaagtattcgacggtatgacattccgtattcaggtggacgttctcgactgtctgggttgcggtaactgtgccgacatctgtccgggtaatccgaagaagggtggcaaggcattgaccatgaaacaccttgaaagccagttggccgaagctgataactggacttactgcgctgaaaacgtgaagagcaaacaacacctggtagacatcaaggctaacgtgaagaactctcagttcgcaactccgttgtttgagttctcaggcgcttgctccggttgtggtgaaactccgtacgtgaaactgatttctcagttgttcggtgaccgtgaaatggttgctaacgctacaggatgttcttctatctactccggttcagttccttctactccgtacactatgaacgaaaagggtcacggtcctgcatgggctaactccttgttcgaagacttctgtgaatttggtctgggtatggaactggctaacgaaaagatgcgtgcccgtctggtgaaagtaatgaacgaagctatcgcttctgattgctgcccggctgaatacaaagaagtatttgctgaatggatcaacaatatgctggatgcagaaaagactaaggaactggccgaaaagatcattccgatggtagaagctgctaaagataaatgcaaccactgcaagcaaatcgctgatctgcaacaatatcttgttaaacgcagccaatggatcatcggtggtgacggtgcttcttatgatatcggttacggtggtcttgaccatgtaatcgcttccggtaaggacgttaacatccttgtattggatactgaggtttactctaacacaggtggtcagtcttctaaagctactccggtaggcgctatcgctaagtttgctgctgcaggtaagcgtgtacgtaagaaagacctcggtctgatggctactacttacggttatgtatatgttgctcagattgctatgggtgctgaccaggctcagactctgaaagctatccgtgaagctgaagcatatccgggaccatcactgatcatcgcttacgctccatgtatcaaccacggtctgaaagccggtatgggtaagagccaggaagaagaagaaaaggctgttaagtgcggttactggcacttgtggcgttacaaccctgctttggaagaagaaggcaagaatccgttccaactggatagcaaagaacctaactgggaagacttccaaggtttcttgaagggtgaagttcgttacgcttctgtaatgaaacaatatcctgctgaagctgaagaactgtttaaagctgctgaagaaaacgctaaatggcgttacaacagctacaaacgtcttgccagagaaaactggggagctgatacagctgaataataagtagaaatactttatacataataaaaggcaggaatcctggaaacagattcctgccttttttgtttatatcttagaagtaacgattacttctcacgaagatattcattaaaactctaaagatatgatcggatttgttatttggattatcggtttgatactgactttcagagctgccatagagatttggaatataaatgcggctgtagagaaaagacttatagcgattgtattaatcgttcttaccagctggctgggactacttttctactacttctatggtaaagaaagaatggcgggatggttgaagtagtgtttgcatatcaatctttctcaggaatccaactgttcaccagttcctgatgttcttccatccattgacgggcagcctgtctttccgttgtctgcgcctcttccagagcagtcattaaggagctgatttccgcatctgtcagacgaatgttgcccaaaagttcggcagcaaaagggtctttctcgctaaaacctttccatgctatggtatgaatggattccgtatttccatatatcagcttcgggtcctgaagaactttcagcttgaaacggtcgaacatccagtgaggcgtccatcccgtcacgacaatccagtctttcttatcaatcgctttctttagggaagcagtcatggcaggtccgctcgaagtcatcagtttataatccaatccatagtctttgatggcctgatcggtagctttcataataccggctccggcatcaataccgacaatctgaccggagaaacgttccttttccgcgttcagttcttcgattgagttgatcgtaacgtaatccggaaccaccagcccgatacgggcaccatcataaatatccccgataacttcgagtttatccccgtattgtttcatataatcttccatagtgacaggcatccagacatccataaatacgtctgctttcttacgggagatagaggtaaatataggtgcaaggtcggcattcagcaactttacatcgtacccctgatcttcaaaaatcgctttggcaaggtttgtcattgcaataccttccgaccagttggcataagcgatacttatcttcttactctttccgttgtctccgcaggaaacgaaggttaagagtatgccggcaataaacattgccgcaatcatttttatcttattcattgattattcctttctttggtgtgattcttatttctttttactttttctgttatctgccataccctgagtgatgcggtccagcacgatcgccaatatcacgactgcgataccgccttcaaatccgagtccgattttcatttgggtgatacctttcagcacgatttctcccaatcctccggcagaaatcatggcagcaatcactaccatcgaaagtgacatcatgatcgtctggttgattcccgtcagaatagtaggcaacgccaaaggcaattgcaccttataaagaagctgccagggagtagctccaaaagagcgggaggcttctactacgtttttaggaacctgacgaatgcccagaccggtcagacgaaccacaggaggcattgcaaagatgatggtggcaaaagctcccggcacagttcccaatccgaagaatagaacggcaggaatcagatagacaaaggcaggcattgtctgcataaagtcgaggacagggcgcattatcttgttacaacgatcactgttggcagtccagattcccaacggaacgcctaaaagcaatgccagacaagtggaagaaagtaccaatgccaatgtctgcatcgtttcttcccaaaagcccatgccgtaaataagcaataaacccaagagggtaaatacggctgtccccttacccgacttaaaccaggcgagcgcagccagcactgcaattgtgatataaaaaggtattccaaacagtacgtgctgaaaaccgtctatgaatcctccgatccccatgctgagagcatcaaaaaaggaagcaaaatgttctgtgagccaattaatggcagtctctatatattgtccgatatttatcataattctattgcgttttgaatgatttcattaatttcttctttatcttttcccgttacttcgatgatcaatgaggaaagtggcactacgccttcaaactcccgattctcatttacgacccagattggcgagttcgtttttgtcatcaacggaagaatatcttccagcaccgtatcacccagcactgaatgaacttcatgccttactacggactcgatggagcggatttgctcttttcgtagtttcagcaagtcattcaaccgcacctctcctactaacagattattggaatcgactaccggaagaacggtcagattccgttcgcgcatcttacggatcagcacctccgggccttctttcttcaaacgtgccactatgggtttatctaccataacagaggaagctgttataatcttgcttcgatctacattctccacaaatcgttctacataagcgttggcaggttcggtcaggatttcttccgatgtaccgatttgtacaatttctccatccttcatgatagcaatccggtcacccaatttaatcgcttcactcaggtcgtgagtaataaagacaatcgtttttttcatcttcgactgcaaagtcagcagttcatcctgcatctgcacacggatcaaaggatcgagtgccgagaaggcctcatccatcaacaggacttcgggattattggccaaagcccgcgccagcccgacacgctgctgcatcccacccgacagttcacttaccatctgattctcgtagcctttcagccccaccagttgcatactttccatcgctttctgctcccgttctcccttttttactccctgtagttcgagcccgaaagctatattatgcaagacagaacggtgaggaagcagaccgaagttctgaaagaccatagccagttctttccggcgaatctgcaacagttccttatccgacactttggctatgtctgttccattgataatcacttctccggaagtagggcgtatcaaacggttgatgcagcggagtaaagtggactttccactaccggacagccccataatgacgaatatttcgccttcattaatggaaagattcgcatctttcaccgcaactgtacatccggtcgctttcaatatttcactttttgttttaccttctttcaacatcttcaaagccttctgcttctcattgccaaaaaccagatagagatctttaatttctattttactcatacaataaaatggtttaggttattaaaataatatacacagcaagacaagaacaaacgataacaggaatctttctttatatcgtataaagttctgatttaaataagggacaaataacaatgaatcccgaaataattaataaaatgattattgacagactgagtaattaaaaaaggaatagaatttgataagataatcctttcaacgaatagcaaaaaatagcatttttatgtataaaaacagcctgttccagtatcttgctggcacaaagatacaaaaaacggattaaacatacaaattatattcaaaatccggggcatacagagggctttatttgtaatgatatggaaagtttccgggtaatattcccctatcactcagcaaaatagaacaaaccggcagataaatataaaataagtttgaatatttcacttaaacaccgtatatttggcgtcaataactaaactagatttatatgttcaacagggctattacaattttcctggggaaggataattgtcattacacaacaaaagaaaaacaaacaggtactgccacactagacgacaaaagccaagtacagttccttagtaaaaagaaccccaaaatgccgtttttctatagccggcggaatctctacatgataggtttcctgctcgcttttatagtgactctgctcgaatttatacgaggacggcatcaaaactttatggtcttctcggacgctactcaattcttctggcaaggcatcagcccatacacaactgaatttgtagaagctcacggacgctacttcctttattctccagttttcacggtattgttcgctccgtttgcgtatctgcctgcatggctgggacctttcgcgtggaatctattcaattattcgctgttctttatggcgatcttcacgctgccccaacaattcacccagcagcagaaatgccgtatgttcctttttctgttactgattttaggacaaagtttactttcatttcagtataacataacggtagcctatttattcttattcgcctatacgttattggaaaaagaccgtggatttctggctgttctgttaatcatgatttcgggatgtaccaaagtatatggaattttcgaactggcattgttgctgtgctatcctcacgtatggcgtaactttggctatgccgttacaatgggcattgtattgcttgcattaccgttaatcaaaatagctcctgcagatttgctcccctattatgaagaatggtgccatagtcttgctgttcatcagtccgccggagcttatgattcatttttctatgcccgccccattgcagcatggacattgccacacttccgtgcacttcagataggaatgctcggcttgctgactctgctctttttggggaatttccgcaaatggtcgtcttttgccttccgtgcccaggctttgggcattctcatgggctgggtagtattactgagtgactccgccgagaagcatacctatattatcgcattggcaggtttcatgctctggtattggagcagaccaacacgtaccgcaacagacaagattctattttggtgctgttttgtgctgttatgtatcgttcctatcgacatattcgtccctatacccatcagagatttcattaccaggaccttatggcttcatgtatgggttttctttattgtatggatacggatgatatggcttaccttccttgcatccttcattcatccacgtgccacaaatgttctttcagattaacgcatccgttagctttgaaagaaacttcttctgccagcaagagttgtttttgttccacccaaccgggcaccagccttccggtggaatttacaactctatggcagggaatggataattcatccggcacttctttcaatgcacgtcccaccatccgcgagcattggggtgcccccaacagcaaagcaatacctccataagtagatacttttcccacaggtatctgggatacgacttcgtacacttccttccgaaaggattcggaaaagctctctttatctactttataatctttcatatatccctctttacgatatcaatgaaatcatcctttccttttcaggaaatctgtcgggctctctccaaactgctctttatagcacttggcgaaataagaaggtgaactgaaaccgacttcataaccaatctccgctacggtcatgtccgaagaagcaagcaaagaagctgccttcttcaaacgggcgatacggagcaattcattcggagagtagttagtcaacgatttaatcttgcggtaaagctgcacacggcttagtcccatatccttgcccaagtcctccacattcaaaccggagtctcccattttctcttcaatcaatgacttgaatctttctacaaaatccttgtccatatcgcaaacatcttccttcgccaatgtctgcccgtcaccaaagaactgtttcagacgacggtgagaatcgatcaggttgcggacacgtgccagcaacagttgtgaactgaacggctttgaaatataagaatcggcaccaccgtcatatccctgaatacgctgttcgtccagtgaacacgccgtcagcagaataaccggaatatgacaggtctgtaactcacttttcagccggcggcaacattcaatgccatcaatgcccggcatcatcacatcggaaataatcaggtcaggaacatacttcatagccttacggattccttcggagccgtctgccgcttcaatcaccgtatagtctgtatgcaacagcgtatggacatacgaacggatatcctcattatcatcaataatcagtacggacgatttggaagagtcatatcctttttccagttcttcctcttccgccaatagaacatctgttgtacgggaatccgcagaaacaagggtggtatccggttcggcagcaacagcctcgcaagactgtacaggcagttcaacggtaaagaccgtaccctgtttctcatcgctctctacagagatcgtaccaccatgcatttctacgaaggcttttaccaatgccagtccgattcccgaaccggtatggtgcatatcgatcttatagaaacggtcgaatacattgcggatatgttcggcagaaatcatagaaccggtatttgccaccgtgaaacgtatccatcgcttgtcctctttacaaagggaagacagacgaacggcaattcttccattttccggtgtaaacttaaaggcattggacaggagattgaaataaatacgttccagcttctccatgtctgccagtgtatgataatccgtatccggcatactatcaaaagaaaaatggatatgcttcttacgggctgccgcctgaaaagactcattccatccttcgaaagaagaaaggacatccaccgtaaccggagtatattccatcttgccattttcatatttacggaaatccagaatctgattgaccagacgcagaagaatgttcacattccgctgaatcagcatgagcatccggtgctgatctccgctcagtgtcttgtccgccaacaaatgttctaccggatcggcaaccaatgtcaacggagtacggaagtcgtgagaaatattggtgaagaataccagcttggcatgagtagcttcttccagttgatgagaaagttgtatcaattggtcacgctgttcttccagtttgtcacgttgctcttccaattgttgcttctgcttaaaaagttctttattcaagcgattctttgagcggagtgatttataaacgaccaataataagccggctaccaataaaaggataatcagactgccgtataaaacgacctgttgtgtagctacctgagagagatagccaccgatacgtccgttgagcgtttcaatctttttgtcgagttcggaaatgtgtgtggtctgcaactgcatgacgtgtgcgttggtacggtccacaacagcggtattcatcaccgtttctttgggatagggtttcttctccagaatatccatagccagttgcagtaccttatcaccattggtcggatagataaaggtagcatccagcacactgtccagaaccagctccagcccgtttcccttacccggcaaggcatctatgccgacaaaaatcatttccttctcccgccctgccatctttgctgcctgataggcacccggagcgatacgatcattatgggcatacacagcatcaatcttaggatgcctccgaagcatactatccatttctatctctgccggaccacgttcccaagcagcatccgctttatcaatcagctttatatccgggaatttactgatggcagccataaatccctgatgccgttccattgcaggagtcgaaccgctcaatcctgtcagttctactatatttcccttccctttcagactggaggcaatatagtttcctaccgaacgaccgatttcataattatcggctccgatataggcagtatatttatccgaaagaatcttccggtctacaagaataacggggatgcctttctgataagcttcttctacaatcggagtcataggagcagcttcgttagcggaaataatcagcagatcgactccttcgtccataaaataatggacatcttccgcctgcttagtgttatcatcccctgccgaacggatttccaccgaaacaccattataaaacattgcttcccgaagaatctcatcattcatcttatgtcgccatgaatcatcgctgcattgagccaccccaatacgaaaacggggtgtatcctgccggcaagccgtcatcccggttaaacaaaacagcaccagcatccacttcagatatctcatcgtcttcatccatctcatcatttcgtagttctttctgtaatccaattaagaacaaaaataagaaataatactgtaaagttctctaacttcagctatttattattctaaaaagaaggaaagcagtcctctttcagaccatcggaaagtattaacaaaagtataaagcgtaaaacaaacacttaatcaatgttataaaacatagcgttttacttggataatttgcagatttcacagaagtccgtatctttgtactgtgtttttcatagtattagatttaaggttaacaaaggttggagcaaggcgttgctcctttttttatgccctgacctttcatctaccggttagttttcatcccattccttttccagtttaccatcaatagtgtagcgtttccatcgtcctacacggcgaccattcttatattccccacattcacgaagctggtcattctttacataacgagcttcgaacggtccgttctgccttccgttcacataggtagaagtttcccaataatcaaagcggttgctcactatcagccgtcgttccttgccatgcaatctgccggcctgataggtagcttcatatctcaattcaccattttccaaattatattcacggtataaaccgtctttacgatcgttcttcatataatattctttctgccttaccccacttccgttggcaaatgagacatggagtccatcttcttttccatccagataggtttcaatcatcagcgtatcgccgctttcagcaaaagtagtccaccgaccattcttctttccattcttataactacccagtatacgtggcgagccaaacgtaaacacggacgaatattcaccgtcctgaaaaccttcttcattgaaataaacggtctcatacaaatcatatgtacctttcagaaaagtatactgtttgcctacctgcttcccgtccttgtaattatgctctttccgcaaagtaccgtcagattcgtacgacagttgcttcccgtgctctttccccatccggaagtttctttcactttccacttttccggtagtaaagtaacttttgctcgtaccgtccagcttaccttccttataggacttttcttctttcagcttaccgtcaaacttggagttaatcttgaagagaccatccttccgtccttctttataacttccttctgttattaatatattgtctacatattctttgtatccgccatcatagaaaccatctttaaaagatgccagcacataggcggaatgataaccatctatgatgcgatgttcgccattcaatgctttttccgttttcagttcctgaaacaacagtctgccatcgcctacattgacaacggatacctgatcgatcttatattccttttgcgcaaacaaaggaagagcaagatataaaaacaaaaatacgttccagctttttgatctgaggaagtttgaaatgtgtttcataaagtagttttctctttttgatttattatttaaagacctgccgcaaagataggcaatcggcttataaaacaaggaaagaaagagggggacaattagagaaaagaacatctgttattatcattctaataattaacagattaagtagtaaatcaaaacacagggaagggggatatttactgaaataagaaacagaaaagaagatgtgtcaaaagtaactaaatttccctccttcaggaaggaggggtggctgaaagccggggtggtaggtatatttcacagttgaatatcaatagcttatgtattcacctaccacctccccctacgagtactcctccttcccgaaggaggagagtttagttacttttgacacacctgctttttgtatttaaagagattctacaacaatctgtctttcagaacaaccggaagttcgggcattgcaccgctctgcgtacaaacataagcggaaacttcgacagccagcttatgagcttcgggaacagacttgccattcagaatggaagcacagaaagcggcagtaaaggaatcccccgctcctaccgtatcggctaccggaaccttcggcgtttcctgaaaagaaacgactcccggagtaaacacataactaccattgataccgcaagtaagaatcaacattttcagattgtacttggccaacagaatccagcacttatcctgtaagtcgatgcccggataaccgaacatacggctgattgtcaccagttcttcatcgtttatcttcagaatgttgcagcgtttgaaagactcgcgcaatacttctttcgtgtagaagtcctgacggaggttgatgtcgaatatcttcagctgtccgtctatatcgggcattgtatcgaggaatcggttaattgtagcacggctcacttcattgcgttgagccaacgaaccgaaacaaacggcgcgcgtattcaaagccagccgcttcagttcgtccgtgaaaggaatgttatcccatgccactccttctttgatttcgtagcaaggcaccccttcgtcatccagtgtcacctgcaccgtaccggtaggataatccacccgctcaatctgatttttgagttgcttttctttgaatacttccatgatttcatctcccagttcgtcattgcccaccgcacttactacacggctgtcgaaaccaaactgtgaaacatgataagcgaaattagccggagcaccgcctatcttctttccttcgggcaatacatcccataatgcttcgcccattcctacaattatattattcatgatctacagatttaattgttttccaaatataaaattattttttgatacggaaggtatagaacagcaagtaaagtacaccgactgtcatcacagcaatcgcaccattctgccccatagaagtatccgaagcaactcccatagccaacgggaaaacggttcctccgaagagtcccataatcatcagaccggaaacttcgtttttctttcccggcagataaagcaatgcctgcgagaaaataacagagaacacattcgagttaccaaaaccgatcagagcgatacaagtgtaaatcaccgccttatcatggaagatgaacaaccctaccatagcagccagcatcataacaacactgataccgaagaaagatttcggagacatctgacgcaggatgaatgatcccagaaaacagcctgccgtacggaagataaaatagaggctggttgcaaaagcagcatcatccagtgtcatgccgatgcgttccatcagaatcttaggtgcagtagtgtttgtaccgacgtcgatacctacgtgacacatgattccgataaagcaaagcaggataaacggtttgccgagcaatgccaggcactgtccgaaagtggaaggtttgccttcttccttctcttcttcaatctgtgtcgcgttgagcaacagaatggcaaggatggctattaccatataaatagggaataatacacgccaccccagatcgaaagaaggaatcgcctgcgttgctccccacatggcaatgtacggtgcaaggaaagaagcgatcgctttcacaaattgtccgaaggtgaggctgcttgccagacggtcaccacgaacgatgttggaaagaagcgggttcagtgaagtctgcatcagtgcgtttccaatacctaacagggaaaaagaaatcagcatcagtgcgtaactgtccccgaagacaggcaacagtaaagaagcaaaagtcacgatcaaactgagtaacacggttttcttctgaccgatacggctcatcagcatacctgtcggtacggagaaaatcagaaaccaaaaaaacaccaatgaagggaagatgtttgcttgtgagtctgtcagacccaggtctgcttttacataattggaggcaatgcccaccagatcaacgaatcccatggcgaagaaacaaagcatcaccgggactagtttggagagagaagcgtttttagtattttccattgttttatctattataatttcgtatattagcacagtaattattttcctttcctattgatcctttttcttttagcctcctattttctttgcttatcacggctgtgaacagaccgtatcacaagggtgataagaccttatcacagtaatgaacaaatcgtatcacgtaggtgaaacgctatctatctcccatacataaggagaacataaaggcatgttaacgcaaggataaaggtatgttagcgtgaattaaaaagagcgcagggagaagaaagtcgttttttatttcttcagtttgtaaaccacgaatgaatctactttataggcaccgcctttgctgtagaagctgatatgattgtaaggttccgaagggaatacctgattggtcatagcgaagcgtccaccgtcaccgaaagcctctacacttgatctgtctacaaacaggcggagtttcatttcatccttatccccttcaatcgcagtccaagtcagcatcgggaagttttcgttgaaatttacctcgccactcttgcgacggtccatcgagaatttcttctctttcatgtcgtactgcatgtctacttcttcgcccttgtcattgtagagacggaaaccgatgatttctgcctgctgattcttgagggacagttctatttcgtaagcaccttcattgttcggaatcaaatctttcacgatacgtgttccgttaaccttgaatgagcgctttttggaaacaccacgcagtttcagtaattcgggagaaggagcggattgaagataaatcccaccgtcgatggcaaagagactcaaatcacgagggatggagttcggactacggtattgagaagttggcacgtcatttgcatattgccagttgctcatccatgcaatggcgatacggcggttgtcgggggcatcgctccaagtaactgtagcataatggtcttttccccagtccatccattttgtgacattcggctgattgtcacaactaaatttcttgccgtcgaagctaccgataaagtattgagtagcggagtcaccgaaaggaccgtcaccaaggctgcaaagcaatacccatttcttttcgttggtgccctctaccggaagttcgaataaatcggggcattcccatacgttgccgtgagcaccgtatccttcgccgaagctgctttcaaatgcccagtctttcagattgggagaagagaaaatctgcatttcctgtcccactgcgagcaccatgatccagcgttttgttgcttcgtaccaaaaaactttcgggtcgcggaagtcacgagcttcggatacaagtacggggttgttttcgtatttggtgaaagtgcgtccgttgtcagtgctataagcgatgctttgtacctgacggtcgctgttttgtgtataaatggcgatgattgcgcctgctccgaagccggctgtattgttatgatctaccacggcagagccgctgaagatagtaccgagcgcatccggtgctatcgcaacggtgcggtgttcccagtttacgaggtctttgctgatagcgtgtccccagttcatgtttccccatttggagccataagggttgtactggtaaaaaagatggtattcaccgtctttatagaccattccgttcgggtcgttcatccatccgtaaaggggagagaagtgataggtcggacgaaacttttcacggttggtcgtatcgaaggtgtcggagagtttcatttccttgcagcaagcggtattatccggcgaaagattgacacggatcggatcgttggagttcatcttgaacttgaaagagaccgttttgccggaaaagtcggaaaggtctaccggaacaaagtaatctactttatgtatggcgagacgcacgtcgaagtttttcacctctttattattaacgatcatgctgatacgtacatcgggagacgcatcctctacgggcagaagcaggtacttctgggaagtattgacacgtacaaggcaatgaccttctcccagattcttaatcagcaaaggagaatccgccgctcgggttgaaacagaaatagtcatgagaataaaacaaatcagaaaggtctgaagttgtttgacaggcaaaaatacattcatgttctatggtattaaggttgttatacttttgatagttgttacagtgcaaagataggcgcttccaaggttagcgcctatcacttttgtttcaaacgctgtaaaagatgttacttgccggtgtagttttcatcaataagtgcttacctgaacgtctgatacagttatttcacctttataacagcagagtgaccacgggttcttctgcatttggtagatacggttggtgaaagataactggtcgttgatataagtcacgcagacggactggtcactgtaaatcgtcacacgatattcattatctgccggaatattgaatttattatcgaataagtatttggcatcgtcaccgtctttctcaaaattcgctttgccttcatcggcattgacatggatactataccaggaagcggaatccgttccacgtacaaaagagattccgaaacggtccgtattcgaagcggtctttacggtgaaagaaatcttgttatgtactttcagacggttgaagatgacggaggcaccttcgcccaaagtataggttttaccgctttcgatcacgttaccatcttttgccattactttcacttcttgtgcggaagtgtatttacggtcgattgcatcgggtactccgagggttaaagtaccgtcttcgtgttgaatcagacgttgtgctaccaaattgcctgcccattcgggttctacatcaccaacatttccattatcatttccggcacgtgtgggacaccaaccccaaatgtagcggtttgttccgtcggaagcggtctttccggcatagaatgcgcggctgtccagcattccttcacgattgtccggccatattccggcatcattggcggtagttgctttcaaatcttccagcgttctgcctttgaaatattgtactttacgcatgaaggaagcctgttccgaataaatcagataccaccagtcccccatcttgaatacatccggacattcgtagaaacgatcccacatcatggtcataaaggttccggcagattcccactctttcaggtcggcagaggtaaattcggcgatatgcccttttccgttcttgcgggtagcgatcagcatgtgatacacaccgtcttcggtctggaacaggaacgggtcacggaagtcattcttgtcataaccatacgtatctcctttcaggtagaaggtacggttcttggtccatgtcttgaaatcgggagaagtagctaccatcactacctgagcattctggtcggaagaaggcttgaacttattaccggtgtagaaggtataatacagtttgtcggcagggttatagatcgttcctcctgtgccgatggcagcatcctgttcgtcacgccctccgcaggaaatcagttcgccgagagattcgtaagtagcaccgtctttggtagccaccccgaaaatgggatggtacgtagcttcggggttcggacggtaatcttgcaggtacatcactttaaagtccttggcaaccggatcatagaatggcatcgggtcacctacaaagccgacctgtggcttatagtacatcgagaagccatgctcatcactcgattggaagtatgtggctgtaccgtcccagtctttctgagtcaagatggggtcagtctcgtcactgcaagcagtcatcgaagctatcagtgcggtaaatgctataggtaagatcatatttttcatcattgttgcttattctttttatttacacaagtagttgattgcattgagagtcatttgctctacgttgtagtgatagtagtcggcagaagcgtctactcccttgccgtaccagtcatagcagccggaaccgatacagagcgtacgtccgctattggaacgcggttcaaattcggcaatgactaccgccccgtcgcctccatgtgccaaatcgattcctcctgtcaggttacgccatgcgttcaggtcgtcataacctccccagtctgtcccgatatgccactgcgctgtgctattggtaatcgcatagccggcatcacaggtatagactgtcgacttgtcgccatctttccatcttaaatcctggaataacggatgtgattcactgccggtaatcaggaagctccatggggcagaggtgatttcgggcgagtcttcgtttcctccccagctattgttcggtacacgctcgtctttagcgatgccgagattggcgatatagaaagtagcgtaacgggtcagcagcagattaccaccattctgatagtagactttaaacttctccgctgccgctttcgcgtcatccggcaaaggaggattgtcaccattgtctgcgtggaaatgccaccagatagcggtatatttacctaaatccacttttccgtccactacatccttgaatgagatatattcggacatcgatacattatccatcatccattgggcagcggctttctcttcgggactcgtcagaaggctgacggaagaagccgtaccgacaaaggcagtcggaatcacatttccctgagtaaccgttaccacataaggagttactgccgaacggtaagttgccgtgtaagtaacggggttcgtaaagtcctgaatacttccggatgccggagtcacggtagctccgtccgttacggtaaacgtacctttcaactgagtgatatccactgtcagcggaacgactacagaaatggttttcgataactggtctacctttcctacataagtatcattcaatttgaaggtcagtatcttcgcctcatctctcttcacggtaatcgtgtagctcatttgtacatcgccattcttcaccgtcaaagatacgggaagagaaaagtcgattgtctcaccgatagcgatgctagccttggctccttcggaaagattcatttctgtgaccaccatgcgggtaatatcgtaatcgtagggcactcctactacgattgccttattctgatagtcgacagttcctgcgtattcatccagccggatagagttcacccaaacatctccgtccagacgaaggccggatttgaagtcatcactacatcctgtgactgtaaggcatgccacagtcaccaacaggatagtataaagttgttttatgattgatttcattgtattctttgttttaagatggttagttaccaaccgaaattctgtgtataatttccattacttgcgctgatctgttcgaatggaacaggaagatattcgttcttattttccgtaaagcccgcattcttgtagatagagcaacgggatgcttccgtcacgtaataagcattgatgacatctttggcttctccccatcttacaaggtcaaagaaacgtgagctttccataccgaactctacgcggcgttcccatttcagcattttcatggcttcgtcctgagcgtaagctttcaggtcgtaaggagtcactttgaagttcactccgtagtcttctttataattgaagatcagcatggtgcttccggcagcacggctgcgtacctcattgattaatgagatggcatcggtgatacgtccgtcgttcaactgaatcagtgcttcggcacgcatcagcaatacatctgcataacggatcacaatgtgattcagagaactggcccaataagaacctttcttcagacagtcacaatcgggatctacattctctttgagagaaacataatatccataaagtcccttgctgcggctccagtcatcattcttctggatgatgtaaccttcgttgtacttataaggaaagcccggcatacccaccgtatggaacagacggggatcgacattgtctgtagccacttcgtaattctcattgtcgtaggtactgaacaaaggctttccctgcgaatcggttttgaaagcattcaccagattctggctcggcttatggaagtcgcagcagcccagtatctgcggagtggtcagtcccattccccaattcaggttaccgttgtaagtaccgtcgttgatagaatactgaatggcccatacagactctgcaccgttttcgtattgcggcaggaagttcatgctatagtccgtttccagtccgtaaccgcctttagccatgatcaggggatcggtgtatttcacgacctgtttcaggtcttcttcgttgattccggtaagggtattgtcggctccgtcctggcggtaagctttatacaggtaagtctttgcaaggtaagcagcagcggctgcctgtgcagggcgtcctttttctatttgtacttccggcaggttgtcgtaggcaaactggaagtcgtctgctatcttttgccattgctcgtcattggtataagtggtattcgacagttcattgtaagcatccggttccatgttttcatcgtttacaataacgatcttcttgaacagctgtttcaacatgaagtgagcgtgtccgcgcaggaatctcatttcggcaatgcgctggttcttcaacggataggtcttttcatccatttggtcgagtgattgcagagctgtgttggcacgggtgatgcattgatacagtcttttccatatatcattgatattccagtcggtggtattgatacctttggatatttccagtgcgttgaacacaccgccgtcttctgttcccgaaccgcctttatagcaatcgtcggaacgtacatcataattccagagagagaaggaagagttgatatcatcacctgtcgcccagatggcgtaggcagaaatcaccagattatctacatattcgggagaagcgatctgatcgccggtcacaataccctgaggaacctgacggtccaaaaaatcgtcacaactggttgtcagcaaggtaattccgattgttgctatatatattatctttttcatgatcattcgttttattgatgaagtaagttaaaatccgatgttaagtccgaacgtgatattcacagggatcggataagaaaagttcgggttctccggatcttctccggtaaaattcttgctcttgatggtcagcagattctgtgcactgcaatagaaacgcaagcggtccattctcatttttttggagataacagcgggaacggtgtatcctaactggatattacgcagtttcaggaaagaaccgttttctacgaagtaagtagagacacgctgttcattgttcgtatcactgcgggtcaatgccggaatatcagagtttgggttcgtaggtgaccaggcattaagcaaacgggttcccttattcaggaaaccgacattggaagcactccaaaaatcgcttttcttcttcacgtcactgattatatccactccctgaacgccttgccaaaacattgtcagatcgaagttcttatattccagataaatattcaatccgtagctgaaagagggagtaggatcataaatccagttctgatctctttcgtcaatcacaccgttatggtcaatatcacggtaacggatacggccgacagcagcgccttcttgagtagcatggttgtctacttcatcctgcgacttaaaaatgccatcagcaatgtaaccgacttgtgcgccgtaagtatgtccgactacactcttcacaccattaccaccaaacttgccgttggcagctaccgtttccggcaattcaagaatttcattccgataagtggatatgtttccgttcaggtcgtaagtcagtccaaaggcagtcttgttacgataacccagattaaattcaaaaccctggtttttcattgcacccgaatttatccaacggctgccgccttctcccagcactcctactcctgccatttcagtcaggatatctgttgttttcttgtagtagtattccagtgaaccgtacagtgattgcttgaacaggctgaagtcgataccgacattggtctgtgtcgttgtttcccatttgatattgtcgttaccgatctggttgcgtttgaaaccggaaggaagtacaccgccaccgttagaacctgtgatatcgtatgccgtaccgtagctctgtccgccgaaagaatcggttgtaccatagttaggtgcatagatagtataacgggcaaggttggagatttcctgattaccggtctgtccccacgaagcacgcaatttcagatcatcaagccaggtcagttctttcatgaagttctcctgtgtgatgcgccatcccaaagatacggaagggaaagtggcataacggtggtttttaccgaaccgggaagaaccgtcccgacggagagttaacgaaagcagatatctatcggcataagaatagttcattttgccaaagaaagagacgagtgaatacccctcaccggcaccgtatgcctgtgccgtgccactacctgcatcaggccacatatagtcgggggtaaggatagagaagtcttctttgtatccggagaaatggctgtcgtcttcacggttcaactccatacctatcattacatctccacgatgtttgcctacttccagttggtaggtagcaatggcgttccacatccatttcgtccagtgttcctgcttggcttccactgcgctcttgccattatttgtctgcgttccttcctgataaggataagtgaagtaacgtgcctgcttgttggcatagtccagaccgaaagtggaacgtagattgaatcccttgaaaggagtcagattgacataggcatcaccgaacatacgccagtaagtgtatcggttgtctttattgtattcaagtacggcacgagggttacgacggtcgggccatccgcctaccggtccgccccatgaaccatccgaagcatatacgggaatagcggaaggaatgtccagtgcggtttcaataattccacccggagcctgcacttccgacgtgcgatttaatgtaaaatgctgaccgatggtcaggatatcatcaatcaacttataatcgctgttcatacgagccgagaaacggtcgaagtccgtgtctttgataacacccagattcttgtaatatcccagagaaaagaaagaagaacctttctccgaaccgttgctgacggaaagattgtattgctgaataacaccagtacgagtgatctcgtcaaaccagtctgtgtccgccacaggcattgtattctttgaatccaggtatttggaaagagtcattccgtataataccggattgccgtcggcattatatccccaattgtaagcatatcccaaagcattaccgttcggattttcaccgtcgttcacgtaggcttgccacatagctcgtccgtattgctcagtgttcagtacgttcattttactctgatacatggaggcggaaacagaagcgtcgaaattgattttgatctgtcctttctttccttgtttggtagtaatgatgatcacgccgttcgctgcacgcgaaccgtagatagaagcggatgcggcatctttcaaaacctgaatggattcaatatcattaccattcagttcgtgcataccggctttggtaggaacaccgtcgattatataaagcgggtcgttattgttcagcgtaccgataccgcggatacgtacggtagccgatccactcggattaccatcggcggtgatgttcattccggggacacgtccctgaagggctttcaccggattgttttcaccttgcttctggatttcgtctacttttactacagaaacagcacctgtcaggtcggctttacgctgtgtagtataacctgttacgacaacttcatctaccatctgggtatcttcttccagtagtacattaacgatagcagccgcttttacggtcaccggtttataaccaatatacgtaatctttaaagtagagttgaccggaactgaaagagtgaaattaccatcgaagtctgtaattgttccgttggttgtagctgtagtttcaacgacagaagcaccgataatcggttgcccatccgttttagaagtaacgtttccctttaccgtaatgttttgcccccacagggccgacatgaaagcaaacaggaaacaaacgctgcaaagaagttttttgttcttcatgataccaggcattagtttaatgttattaatttaaaagtacgaattttctcttttcgatgatgcaaattacggttgatttaagtcaaccgactgaaaaaaatgtttcaaatgctgtaagatatgttgcatagaacgctattttatagggttttatacccggatgaaataaaattaatagttcataagtatatcccctcgaaaaaggttacctttgtgtgtcaataaagacatttgctaatgaataaacagagaccttttatacataaaataatgaccaaacaacaagctatcaagcttttcgaagaaaagaaaatccgtaccgtatgggatgatgaacaatgctcaaagtggcattttatcgaaaatagaatcaaaagagaagtcaaaagaggaattgaaagatgaatcaaatgagtattcaactaaataactgaatgatatgaaaacaatctccaacgaacaacttactattcaggtatctccatatggagccgaactttgcagtatcctcgccaatgggaaagagtatctgtggcaagccgaccctgctttttggaaacgccactctcctgtacttttcccgattgtaggaagtgtgtgggaaaaccagtatcgtaatgaaggtatcgcttatacattgagtcaacacggctttgcccgtgatatggaatttactcttgtttcagagaaagatgacgaagtacgataccgccttgtcagtaatgaagagacattacagaaatatcctttcccgttttgtctggaaataggttatcgtattcagggtaagcagatcgaggttatatgggaagttaagaataccggagaaaaagaaatgtattttcaaatcggtgcgcatcctgcattttattggccggattttaatgcggatacacagaatcgtggtttcttcggttttgacaaggaagaaggattgaagtatatcctcatctcagagaaaggatgcgcagacccttccactgaatattctctggaacttacagacgggttattgccattggatacacatacattcgataaagatgctttgataatagagaatgagcaaatccataaagtgactctttataccaaggaaaagaaagcttatttaagcctgcactttcatgctcccgtagtcggtttatggtctccgcctgcaaagaatgccccttttgtctgcattgaaccgtggtatggccgctgtgaccgcgcacattacacaggcgaatacaaagacaaagactggatgcaacacctgcaaccggaagaaactttcagaggagggtatacgattgagatcgatgaataagtaatgacagcctattctgcgaatagactgaagaaacacagaacagctgccggacctcacggacggcagctgccaaacacctaatctacaaaacctaacttaaaaactaactcataaatccaatctatgaaatactgattatacaagtgataaacaattgattatatccttgataaatacctattgaaaaataaatccatccttttataaacctaatctatacacactaaatgaatcgactgcgaatgtaccgcccttactgtaaaaacacatacgattgtatggctctgtagggaaaatcagattagtcatcgctatcttcccaccatccagaaatatttctaccgaacacttatcaacaaagacatccagtttgtattcattttccttttggataggcgcccatgtagccaatgcgaaatcatctatataattgatagaagtcgtcttccgtcggtcgtgcgcctcgatctcgtgcggagagctgttcttcccaaaatctacgatgccgcttttcgtacggtccatcaccagcttcttttccggaagattaaggtaaatatccactttctctcccttgtcattgaaaagactgaatcccataatttccgcctttccagctatgatattcagagaaagctcataagctccttcattatcagtcaataaagattcgatgtgataatccttgtctaccgtgaaggacggaacatccttgctttcttttcgtaagttcttagtttccgctaccggtgcggcggaaagataaatatcattatcctgtgtatagagtcccaattcacggggcagtgcattggcactacggaactgccgggtcggaacgatattgcaatactgccagttgctcatccaaggcactgccaccacacggtctcccgtatttgagaaacagacggtagcatagtgatctttcccccagtccagccatttcgtgacattcggcagattgtcacaaataaattttgtgccgtcaaagtcaccgataaaatattgagtagcacttcctccgaagtaacatcccggatttacattgacaatcaatgcccatttcttatggttgatatcgccgtctacaggaagttccaccatatccggacattcaaactgacagggttgcacaccgtatccttcgccaaagctactcaggtagttccagtctttcagattatgggagtcatagaaacgcatttccttatcggcagagacaatcatcacccatttactctccggtgcataccagaagactttcgggtcacggaaatctttcagaccgtcggaaggacgcaggacaggattcttttcgtatttagtaaatgttcgtccattgtctttgctataagccagacactgaatctgtccgttcttatcgctggcagaagtatagtaagcgaggatggaacctgctccgtagcccgccacattctcctgatcgacaatagaactgccggaaaagatatgccctaatgtatcacgggcaatggcaggagccagatgttcccaatgcatcaggtccttgctgaccgaatgcccccagtgcatatttccccatttggagccataagggttatactgataatacagatgatactctccgtctttatataccaatccgtttgcatcattcatccagccataaaggggagtatgatggtagacaggacggaatttatccgtattggcagtatcaaacgtatcggataatttgatttcttcccagcagagggcgtctttcggtttcttttgaatgcgcagagtgactgtctttgcatcagccggcaaagcaaagggaacaaaataatcgacctttgtctgtgccagacggatatccatatcggtatccgttgcgttccccgtatcaagacgcacctgactttcgtcggcttcttcttcgatggggagtaatatataatgggtaggatgaacgatgtggacaattgtcaggctatcccccttctgttcaagagtgaacgtgcttttggtcgactggcaataggtcagtccaaaggaaacagtcagtgcgagtacggcacctttacacagttttatccaaggagttgttttcatggtaacaggatattcagagttatactagtgttaatcaaaaattgacggaggcaaagatagggggtatcttcaccttcgtctataaactttgtttcaaagagtaacatttttgatacatcattgaaaaaagggagctacaggcgtacagagtgtgttttaaactacatgaccaactgtgtgaccagccgccaagacaggatttgaacctgtacctcaagtctgtaaagacaagcgttcaaccgaatcgttaacagcgaagtatctctatactacggcatccctttctgttttttaaaagcagaagtaacaggcgaaaagagaaacggggcacgtcaatgccggagtcgaaccggatagtcttgctgattttacaacttcactattcctcccctaaaatgagacgaagtaactcttctctacgacattctgcttatgtcaaagtaaaaaacaaggtaacaaacgaaaagagactataacctgctctatccaactgagctatgcttttccttaaagaataaggagagcagcgggagtcgaacccgcgacctatggtcgtcccaaacgaagtaactcttctctacgacacttgtttctgtttttttccgtaaaccggaatcctgagaactccggttatatcactatcttttttatctcctgcaacgcatcatttcccttgtcgattgcagacaaaatatcaaatatcttatccgaccatcccgctattaaaaatacatcgtcacgagtgatatccagcggagtgttgccatatccgcttaagtcaaacagatacaacttggctgccggacaaattttcttgtacttcctccacaaatccgttatctgcaaatcactatggctattccacaactgacagtcggtgaacatcattatcttatccatctgcgccttccggtctatcaggtctttgataaccaaatacccgtttgtagagtatcccacttcaccttcccttttatagaaagcatcgacattggacaagatacccgtatcgggcagattgataatcttccatctatcgccaaagatacccgtcatcacctgcttgcaacgtgacttcaataacattcccagcagcaaaccgatgtcatagtacaatactttactctttgccgaaaccggacactgcatggaaccggatacgtcacaggctatcagcacacggatagattcatcaaatccggtaatattgcgagcagatacctgcacggcacgttccaaagccgtcatcaacatcgtagcatagagcgaaggagtcttcgacaactcacggtaagcagccaaaaagcggaaaggcaactgcctggagttctcaaccgccttttcggaagacagcctcttccctactgtcagaatatgatctgcggaaacttccgcttccaatatattcctcagattgcgcagcaaagccatgtatcctagtttaccactgtctatcaattcttcccatttggcacggaaagcttttcgccgttcttcttccgtagcaaaggtacgctgacctaaagcagacaattctgtctcccaagtatagggaaccggaagattatcgttaactattccattgaaaatttcctgttgccgttcatctttcgctttcgggtgcacaagaaacaaggcatctttcagacaaacttctgccgaacggttatacttggcaaactggtacgcatcgaatgtattgaatgcatcctgtagccctgcctgcaactgtttggaaagacggttcagtttctttgtccccgtccgccggtttgcctgctgataacaggccagcagttcggtgatttcatcggcacgccgaacggtacgggcagttacccgcttcaccagattgtcgccctggtggatacgcgccagttctaccgccatcaccaaagggatggaacgcaggttcatcgtttcccttgcgtacgccgccagttgcgccacaaacaaagggttacattttccgatgagcgtacggaccctttctattctctcttcctcctgctcatagaaactgttgttcaatgaagtagttaccacggatgtgtacaattcccattcgggtgtcagccggtaagccggtgccgattctttgttcagcactttattcattcctttatttatccagttaaacttcatcatttatactctttatttgttttcttttgcaaagatacgggggtgggtacgcagcctttttgcgtacctcaaattatttttctacttttggagaaaatctttatacttccgcctatgccggtcaatagaaatgccttgattcgttataaaacgattgataactgtctgcgtaatccttatcgtcgctggacactggaagacttggtagatgcctgctcggatgccctttacgaatatgaaggaatcgacaagggaatcagcaaacgtgccgtacaaatggatatacagatgatgcgcagcgagaagctgggttataacgcaccgattgtggtatacgaaaacaagtattacaagtacgaagacccggaatacagcatcacacaaaccccgctgaacgaacaggacctgaaaacgatgtcggaagccgtggaagttctgcggcagttcaagggtttctcctacttcacggagatgagtgagattgtgaaccggctggaagatcacgtagcctccgcccgaatgaagacgactccggtcatcgacttcgaaaagaacgaatctctgaaagggctggattatctggataccatttaccatgccatcgtcaacgaacatcccctgcaacttaaataccgttcgttcaaggcccgttcggcaaacagcttcatcttctatccttatctattaaaggaatatcgcaaccgttggttcgtatttggagtcagaaaaagcggacggatattgcagaatctggctctggacagaatccattcgttagaggtgttatcgcgggaaccctttataaagaatacattcttcgacccgaacacattctttgacgacttggtaggggtgaccaaaaactccggaagcaaagccgagaaggtcggttttaaagtagccgccaacgaagccccctacatcctgaccaaaccgatacaccacagccaacgaaccatagaaacattggaagacggaagtgtgattcttgaaatagaagtagtcatcaaccatgaactggaacgggtattcttcggatatgccaacggaatacaagttctttacccgcagacactggtggagctaatagaaaagaaattaaggagggcggtagaacaatacgaaaagcccaagtgagttacattcggataaaaagcaagtaaccggaccattttcatcctttccggagagaaaaagacattttatgatacaattaattccattttaatgaagaattaatttgctttatcctctctttttaatggttcgacctttactttgcccttgataataccgaaaaactcattaaattatgaatatgaagagaagtttaattttactatgcggtctgctgaccggctttaccttgcaatctacaaaggtaaacgcgcagacacaaacagtggctaatgaccagaaactggtctatccctacacctttgcccccagcgaaggtctggtgaaccaaacagaaaaggaacatcgacaagagatttgcatcaacggttattgggatttccagcctgtccgcttgccgaaagaatacgttcagggaaaaggtatcgctcccgaactacccctgccggaaaacgacagcgaatggagcaaaacacgtatcaaaatcccttcaccgtggaatatcaatgcttttgcttaccgcgacctggaaggtcccgaccaccgcaactacccttcataccccaaagaatgggaacaagtgaaaatggcatggatgaagaagaatgtcaccatccctgccgactggtcggggcaacaaatcaaacttcactttgaggccgtagccggatattctgaagtctacgtaaataaagaaaaggtaggcgagaacttcgatttgttcttaccgttcagctttgacatcaccgataaagtgactgccggcgaaaacatagagatactggtaggcgtacgaagccagtcgttattcgaaaacaatgcgaccatcggacgccgcattgttccgggcggatcgatgtgggggtatcagatcaacggtatctggcaggatgtatatctgttggctttgccgaaaatccatctggaagacgtatacgtaaaaccgctggtatcaaagaatacactggaaatagaagtaactcttcagaaccggacagagaagaagactgatgtacaactacaaggtaatatctgcgaatgggtgaactgcgcaggaacagacgtcaactccgctcccgttccgaactggacgcttggtaatgaagcattgaaagtcgctcctacgaaactgtccctgccagccaaggcttcacagaaagtgaccttgcaagtacctgtcgacaaggacatattaaaatactggactccggagcatcccaacctgtatgccctgttactttccgtcaataaccagaaacagactgtcgataccaaatacgaacgtttcggctggcgtgaatggacattgcaaggtactacacaatacctgaacggcgaaccttacgcattgcatggtgactcctggcattttatgggtatcccgcagatgacccgccgttatgcgtgggcctggttcaccgccattaaagggatgaatgccaacgcagtccgtccgcacgcgcaagtctatccccgcttctaccttgatatggctgatgaaatggggatctgcgtactgaatgaaacagccaactgggccagcgacggtggtccgaaactggactccgacctcttctgggaagcatccaaagaacatctgaaacgttttgtcctgcgcgacagaaatcacgcgtccgttttcggctggagtatcagcaacgaaaacaaacccgttatcctgcacgtttacaatcgccccgaactgatgccggtacaaaagaaggcatgggaagaatggcgtgacattgtacatcagtacgaccctacccgcccgtggatttcagcagacggggaagatgacggtgacggtatattgcccgtgaccgtaggccactacggagacatcaactccatgaaacgctggatcgaaatcggaaaaccttggggaatcggtgaacacagtatggcttattacggcaccccggaacaggttgccaaatataatggagaacgcgcttacgaatcacaggaaggccgtatggaagggctggctaacgaatgttacaacctcatcgtcaaccaaagacagatgggagcctcttacagcacagtcttcaatatggcatggtatgccttgaaaccgcttccactcggcaagaaagacaaaagcaaagctcccaccgttgaagctgacggagtcttcttcggtgattacaaagagggagttccgggcgtgcagcccgaacgggtaggcccttattgtacgacgttcaaccccggttacgacccgaccttgccgctctatcaggaatggccgatgtacagtgctctacgcgcagccaatgctccggggcaaccggcctggtctccttatgctgtaatcgacaaacaacagtacgatcatcgcaaaacaacaactccttccaaaaagtataaggaagtcatctttatcggtagtcagaacagtaaattaaagcagctgatggatgcgcaaggagtcatattcgccaagaaggcaaacactccttccctgttgctctatattgtagacggtagccaaaagttggatgcttctaccaaagatgagatgcaaaagcaaatcgccaaaggtgcggatgtatggatatggggactcacaccggaaacggtagccgcatacaatgaaattcttccgcttccggtgtccttggataatctgcagcgttcttctttcctgcccgtacaaaagtcatggatgcacggactcaataattccgacttctacttctgcgaacttcagaagaccaacgcttccagctactcgctgaaaggagctttcgtagaagaaggcgaggtcttgctgaacgcctgtaagaccgactggagaaagtggaacaaacgcccggaagagatcaagactgccggaacgatccgcagtgaatacgaatgtacagccgccactcctgtatttgtaaaatgccagcagaacgcttccactttctatctgaacacattaaccgaatttgccaactcggagaaggggttcaacactttgagcgctatcctgaagaatgccggaatagccttccaaaagccggaagtcaatatcgacgaggtcttcttcctgcgcgacgaacagatcaacttccccgtagccaccaaagagaaactggtgaaggacagcgacggtgaatggacactggaactttatgtattcagtccacgccctctggacgacctgttgatagagccgaacatgccgaaactatccctctttgtgaaagcaaagaaacgtgcgctgctcatcaacgacaaaccttatacggctgtatcccacgacggacgcaacgaaatcatctacaaagaattgcccttgctgcaaggatggaataaactggtgatcaaactaggagccggagaccggaacgacttcaccggctatttcaaatgcgataacaagaaagatttccttccgttgttgaaagcagctttcgtgaatccggaaaccaaataatagtaaataaatatatgatgaaacttacacacattttagcctcggcggctatcatttcaacgctgagcgcatgtaacggtagcctgcaaacagcggatcggacaccggtcgattacgtcaacccgtatatcggcaacatcagccatctgctggttcccacgttccccaccatccagttacccaacagtatgcttcgtgtttacccggaacgcgccgactacacctccgaactgctgaaggggcttccattgattgtcaccaatcaccgggaacgttccgcattcaatttcagtccctatcagggagaaaagctgcgtccggtcataacgtacaactatgacaacgagcacattactccttattctttcgatgtggaactggatgacaaccgtatgaaagcggaatatgcgctttcccatcagtcggctatctaccggataacgtacgaggcagacaaaccggcttacctcatcgtgaactcccgcaatggctctatccacgccaacgagaacttcatcagcggccgccagcaactaaatgacaacaccaatgtctatgtatatatagaagcacaggagaagccgataagcgccggcatcctcgaaaacggcactattgaaacaagtaaggataatgccgaaggcgcaaacgcctgcgcggcatggcgctttgccgatggaaccacaacggtcaacctccgctacggtatttcttttatcagcgaggaacaggccgaaaagaacctgcaccgcgaattaaaagactataacatcaaagcactggcagaagcaggacgccaaatctggaacgaaacgttgggacgtatccaagtagaaggaggaacggaagatgacaaaaccgtattctactcttctttctaccgtaccttcgaacgccctatctgcatgagcgaaggcggccgttacttcagcgccttcgacggaaaagtacacgaagacaacggtactcctttctacaccgacgactggatttgggacacttaccgtgccgcacatcctctccgcacactgatcgaccaacaaaaggaagaagacatcatcgcatcttacctgcgcatggcggaacaaatgggcaatatgtggatgcctactttccccgaagtaacgggtgacacacgtcgcatgaactccaatcatgccgttgccacggtagccgacgcactggcaaaagggttgaaagtagacacggcaaaagcctacgaagcttgccggaaagggattgaagaaaagacgctcgccccgtggtcgggagcaccggccggctggctggacaatttctaccgtgaaaacggttatatccccgccctccgtgtggatgaaccggaaaacgacccgaacgtacatcctttcgagaagcgccagcctgtcgctgtcactctgggaaccagctacgaccagtggtgtctctcccgtatcgcccaagctctgaacaagaaggaagaagccgaatactatctgaaatgttcgtataactaccggaatctctacaataaagagaccgctttcttccatccgaaagataaggaaggacaatggatcgaaccattcgactaccgtttccccggaggcatgggagcccgtgagtattatggagaaaacaacggctgggtttaccgctgggacgtgccacacaatgtagccgacctcatcagccttatgggaggaaacgagcagttcatcgccaaccttgaccgtactttcaccgaaccgctgggacggagcaaatatgcattctacgcgaaactgcccgaccatacgggtaatgtaggccaattctcgatggcgaacgaaccgtctttgcacgttccttatctttataactatgccggacagccgtggaaaacacagaagcgcatccgtcaaatgctgaaaacatggttccgcaatgacctgatgggtattccgggagatgaggacggcggaggtatgacttcatttgtggtcttctcttccctgggcttctaccctgtcactccgggattgccggcctacaccatcggaagtccgcttttcacagacgccaagattacactcagcaacggagccgtcttcgaaatcgaagctaagaatgcttctgctgataacaaatacatccagtccgccacgctgaatggcaaagaatggaacaaatcatggttcagccatgacgacctgatgagcggtggcaagctagtattggtgatgggcaacaaacccaacaagacatgggccagcggagcagaggatgttcctccatcattagaaatcaagtagctatattctagcgattaagcgcaagaggtttgtcgaagaatcatcgaaataatatctgattcttcgacaatacctcttgtcatattctccggacgacagctatcatatacgagtattccaacactttggttatataaaataagtccccgattcttatgaatatcatattgtttttcgtacttttgccacataggaacagattcaagtagaagtactatgaaatatcaactgcaattattgatttttatcctgctttgcctggcgggcagactggatgcgtctcctttatatgattacggactttatcttaagtctcatgccgtaccggcaccggaaaggtctactttatatttggatgacaaccaacctttctccgtaaaaaacgacttaaccatttcttttcagatatatatacgtgccaatgaagccgactatggctccattcttcatctgaagacagacaaaggccagataatacgcttttcgtttgttgcaggcgagcaaaaccatgctcccgctttaatgctcaatgatgaaattatcatcattgacaaacccatagaactggaaaaatggatcaatgtctcgctgaatctacgccaaaaagacaatgtgatcgaaatagaatacgacaaaaaaaagatgtcgtccaccttccccctgcaagaaacaaacagtgtaacgattacattcggacagatgttaggctatcaggcggaagtagcccctgtcaacttaagggatatcaacatcatacaggacggcaaactgacaagagaatggaaattatggaaacataacgacaatctctgttatgacgaaaaagagggagccgttgcacgtgctgtccagcctctctggctgatagacaaccatatcgaatggaaaacaatcaataagatcactacttccagcagagtaggcatagcattcgacgcccgttgcgccttattctatgtagtcagccccgaatcggtgaaagtgctggacgaagacggaagactcaaacaagagactgccgtacgcggaggatatcctgccgtagaatatcccaatcacctgctgtatgatacgctgagcaatgcactggtatcttactcactgacagaaaacatcatctcccgcttttcgttcgccgacggaaaatggagcaacgaaatacggaataccaaagagcccaacaactataaccatgccaaagcatttaaccccgccgacacctcattctactttttcggcggatatggcttctataaataccgtaatgacctgttccgcatgaagtccggcagtgaaattatggagcaaattaaatatgatcatcctctttatccccgctattcggctgctatggcagtagtgggcgacgaactatatatctttggaggcaaaggaaacaaatatggtaaacaggaattgagtacccattactacctcggcctgtatgccatcaatttaaaaagtaaacagtcccgcaccatctgggagaaaaaagacgataacaaggaaactatcatggcttcctccatgtacttcgagccgacagacagttctttctatgccgtatctacggacaacgggggaacactgtggaagatttccatgaaaagccccgtttatacagaagtttcaaaaccgatcaataaccgactggattatcaggactgcgattttaacctttactattcaccgactcacaggaaactgttccttgtactggacaagatactgaacaatcgtacgcacgatataaagatctactccatcaatatgcctctagtcaacgagatagatatccgtcagtcggtggatgaaatgggctccggcaaatggtggaatctgctgtacgtcatcggtgccctggcaatactaggttgtggtgcctggttgttctatcgttcaagaagcaaacgtcagccaatccaatcgtccgcaatctcaaaagaaacacttcaatcggttacggctccaaaagtcatctcagagaatcaagagaaagttactccgacaatgccggaacaagaaaacgagcccgcaccgaaagagatagtccactactacgaccgtagccgttcctccatctcattgctgggctgtttcaatgtacgcgataaagagggtaatgatatcaccgccaatttcactccccgtctgaagcacttgcttattttgctgatattatatacagaaaagaatccgaacggtatcctgacctccaaaacaacgggaatcctatggccggataaggaagagacggctgcccgcaacaaccgtaacgtaaatttacgcaagctccgggtattactggaaagcatcggtgatgtagaagtcgtgacggaaaacaacttcatgcacattaaatggggcgagaacgtattctgcgactatcgcgaagtacttgcacgcatccagcaattcaaggagaaagaaaacagcgagttactcaaccggatcctggaacttctgttgtatggaccattgttgcccaacactattctcgattggttggatgacttcaaagagacatactccagccactccatcgacttgttgaaggatctgtttgaaatcgaaaagcaacgtaatcatccggacatgattctccgcctggcagacatcatgttcctgcatgacccgctgaatgaagaagcattggccgccaaatgcgctgtgttctccgcacagggaaagaaagggattgcacgaaatctgtatgaccgtttctgcaaggagtatcgggactcgatgggagaagattataaaacaccattcgccgatttataactatatagctttacttctttcctgcaaaggaatgaactaaacagtagtacacaatagtaactcaactctcctccttcgggaaggaggagtggtcgaagaccgaggtggtaggagaaataatatttatacctatttctttgtaaatgataggattacgtattcacctaccacctccccctacgggtactcctccttcccgaaggaggagaattgaagatagaaccgactatcatttagttcaaaaccgtacgggaatgagctaaactgtatgaatggataatcagatgtacgaaagaagcatggaggacttgacaaaccgctttttatgttgtatatttgtaagtagaaaccggaagaaaatttgataacattgataatatagacgaaaaatgagcgataataagtataatataataacagattacaggcatttccacttcggataatgcttgtcagatagtctgatacaagctaagggctgcgattctttatgggaattgcagccctttttgttgctttatattgatatttattactaaaatagcaatattcgggtttataataaacttgggggacgtttataataaacgatgaaagaatttattaataaacgattggaagttactgcataatcggtcaatatctttcgtatagatatgggtgctgaccttgaaaagttctttgtcctttaaataagcaaatgaattattacaacaattactcttttctttttttatgtcataggactaaaaacctcactgtaccattacgaatgaatcgacaaggaaacaatgcatgacttcactactgactcaaaagaaaagcggactatcagtcggcgggaagactcccgccattgatagtccgctctttttatagtatacctacttgactctatatcaattggattctcccatgatagtagtggcagatgatccccaggtaaagttgctcttcaatgccgaattggacttcaagtaaggttgctgaaccttcggtcccttcgtccattcttccgattcggatgtcaatgtattcaacaggtcttggaagtgcatggaaactacgtgtttcgggtccggattcttgtaatattccaaatattccatcggtacatataccgtgctcggccatgtcttaaagacagtacaccaggttgtcggctgggtagcaccttcgtcggcatcactacgggcaacttccttacactggaacggcaatgacttcaagtgcaaagtcttgagtgccgtcacattatcaaagatatatccgtaaacataagtcatggtactcgggaaccaagcttcatttactactgagttaccgaacgcgtgacgaccgatataagtcggaccttcgttcaccactaccgttctcagcttggtacagttacgacaagcttctctcggtacgtattgcaatcctgtcgggaatgaaatattctccagaaggttacatccgttgaatacaccattcttcagcgtttcattctccacttccgtcatatccaaagttttcaggttgtagcccttacccgctgtcatcatgttcttcagtaagttcaaatcggtatcgttgagtctgcccttcaattccaggctagtgatggattcccaatctttatagatttcgtcatcaataagaccctgcaatacattcgtcaaacctcccggagccggaatttcaatctgagtggccgcagcctgacggataaccatatagtctttcttgttttcataacccttgcgatagatgtaaacggtagcctgacgttctctcagtaccttattcacatcgtacgtgaagatgacacgttcgggcatggagttgtttgccatatgcagccaaccattctctgtcgtatagccactttcttccggatatacgatatccaccagaatctcgttcttcggatcggtcaacgtagactgtacgctatacttcacggtagcggcactgcccagcttatccaaacttgttctgaaatcgttcttgttggtaataaccagttccacatcgcttgcctgagcttgagtcacgataaactcttctctcaccttcttatcggcagcggcacaaagcgcgatcgttgccgtacgttcgccaccggtattttctttcacggaaacgaggaaggtagagtcgcccttggcatctatagcaggcttgaacgaaatccaatcctgatcgttcttatcaatatcaatcgtcaaatcccttggtccgttggtattggttgccttatatttcaacagaatcgaatcttctttcgatgccaggttagtgaacatttccttgttatcgaccgtaatgacaggtttgggcagaccggtctggaagatattcatcgtagcctttacattatcattatctttcgaagagatttcaatggtacctctacgaatatcaaacttctgattcggcaacaccttaaagtacagtgtatggttttccatcgcacgtgtctccggttcgcctgcgggacgttcgtccgtcggcatgatccagcccgtgtcaccggaatagaggaaactggttttatactctcctgtgttaattccaaactctacggaaataatatgctcaccggcatccaagttttcgtaggccttcgggtcggtgattaccaccgcatccttctgtgcctgatagataacgaaatcatacttaaagccaccggacacgagagaaaaattagcacggcgtgcatccggttccacattttcggctgcagctacccatactttgttgccttcgccggccgttccttcgcgttcaaacagcactacccagctattatccacaccttccgaatcatccagtacgatatgccaatcctgattggcgttgaatgtcagtacttgagcggaatttcccgcagaagagaaactgaaggtggacgcttcgttcacgatctccaatttaggctctagcggcgtcaccacttccggaccggtttcatcgtcaccacatgcagccagtaacgatgccaccaaacatccggtcaagccgatatatttccaattgataaaatttatcgctttcatgcttatttcactttaaattcttcttttacaatattaaggtatttcataccgtatccattcccgtaattcgggtcagtcggttcgatagcctgatccacattccaacggttaaaagaatcgatgatgaccatcggacgctttcccaagttcatcttggcaacattacacatcttacggaacatatcttcatccttaaataccacggggaagttatagaactgagttccatcaccatctatccactgattgaacgaaggtgaaacgctaggtacgaagtctactccgtaattagcccactcgtattcacggttgtacttaaagttctggtcgatgcactgcgggtagcacgtaggacggaaccagtcggtctgattgtacatattatccatatacacagcatccacttttccgctcaggaagaagttatgccagcgtgcgggaggtgtccagcgttcctgacgtgctaagatataaatctccagtccattgccattgccgtcttttacattctcacgcaccctttcacggatcgtattgtaaagtttctcagaatcgcgtgcatacaacttgtcagcattccagacaacaatcatcggtttgccgtctacagtatagtaaagatcgttgttcgtacagaaacggcttgtcaggttgacaaaaaagctataaagttgctcacaacgtgcagagacaccactttcatcggcatcgtcttctatcatggcggtgttgttaagtccgtttgcgaagttattcatatccatagaaaccgcataacgcaagccaccccactcgataccttccgagttgggattcagtcccgccatatagttcacgaaattcacgttaccttcgttcagcaaatctcccttactggtatccagaccgatgttcggcaagataaggaaattgataccggcattatttgcccaggtaaggtgctgctgaatcaagtcagcagtttcggctttattgatatccatcgaataacgtcccagcaccggacgcacattcggacaaagctgtggatactgtccgccctgattatattcaccaatcaaccgcgcatacttcttttcatccacacccgtactacccaagttccaataaatggctcctaccggaatatcgctgctcggtctgatttgcggaatctcatagttcaagaaatgatcatcgatggaaggaccgtcatctgtcggtgaacaggccgatccggccatcagtcccaacgtcaggcatattgcaagacctgtcttattaaaaatcttatactttttcatttttcagtcattacttaattactacttttctaccttataaactaaaagtgtagcttctatcaagaagttgtaagccttgtccaaagcctcttcagcatccttgataccggtcagctcacgggcattcttcaagaactcttcataagtctgtccatacttcttggcttggaaatccatgttgaactgtacataatcgctgttttcccatccggctatcatctcttcctggttaggtacaggttttgcgaactgaagcatcgtgaagatattgtctccccaacgggcggcattaggtttcggactattcttctgtaacaaatcgatagctctgtaataagcctctgcatttgtctgacgttccgcatccgggaagtaaaggcgttcgggccagccgtagtacatatttccgccttcttcataagcctgagatccgttcaggaacagaggcggaaggttcaatgcacgtgtgcggcgttccatacgccaggcagacataccatccaggaagtcggcaaaccagcgttgtttgtagatttgttccagttgtccgtccttaccgtctgctccgttgatgtcggcagtcatcagtttacgggtatcatagaatcctttatgactggttccccaggcgattccttcctgagccatataggcagcagcagaagcagacaagccattctcttcgaacgaagcacggattccttcttcataataggtctgtgcatccttagatcccaagtcgaacttcactttcgcctcagcgcagaggaaacaagcatctgcccagcgcagcaaaggcatcgtagcgtccattgcataatatctcgggttgatgtagcatctgttgtcttcgttcattgacaatggatcagggatttctcttgtaccattcgggtcggtcgggtcgatcggtcttctccagccgaacggtgtacgggcgcccggattgtccggtgtaggcacgtatggaatggaataacgtacacgcaatgaatcacgcacttcatatccatctatcatccattgcaggtgttcctgctgatcgctggcagaacaaccgctcacatcacagtcgtgtgaacgagtcagcacatccgtcatacgataaggctggcgttccggccaataaacgttggagccgtcaaagtaagtctccatacgcggatcgttgtatgagaacaggtaaatggcgaaatattcgttcatggaagggatcagcccccagtttgctttcgtctgaatttcttctttatacaaacgagtgtaataccaggaacagtctttgtcgatcaccgttccatatttgggagcaaacgcatcgtccagagagctgaacagccattcttcatgtcccatagatttcgcagcatattcgcgtgctttctcttcgctgatgttctggatattcatggctatctccaggcgtaatgtattagccagtttacgccatttctgcacatctccgttataaacagggtctttcagaatcttatcagtggatgattcgtcgaactcatcgactgcctgatccagccaacccaaaatggaatagtaagcatcggcttccgaatcataatcaaagatacgcttgtccgttcctccgtccataccggcatggctcagtccgaccggaccatagagtgacagtaactggtagtaagtgaatgctttccatgtctttacaacagccagactgttaggcaaagagccatcatcgtatgcttttgccaactcttccaggtcgcgcagaatctctacataaaacttacggtagaatccgtctcccctttcgttccacggtgtctggaaagcgatgttagtaatgtaacgtgaataactccacatacggttattattcaattcactgatcgcattcattgttttgtaaaccgtaccggggaaaatactctgcagatttacctcatacaatttgttcgggtccgagttgatggtttcgaaaccgtccgtacaccccacggcagtcgatgccagcaggagtaacggtaatattttgtttttcaatttcatgctttacgaatttaaaaagaaactttaatatcaaatccataggttgcggaaggcaggttgaaaccacgttcgaaaccttgtgcatttcctgttgtactcgttgcctgcggatcaagcccgtgcggtgtattggcaaacaaggtagcaatgtttcgtccgacagccgccacacggaatgtctggaacggagtctttctcagccattttttcggtaaatcgtagctgacagtgatttcacgcaacttcacataagaagcatcgtagatgaaacgggaaatatcgcgagaggtatagtgcatccaatagcgttcgggggtacaataacccaatacttgttgtcctgccagcccttctacgtcttcgtcataacggcaattaggaagaactacccctttaggacgtccccagtcaggataaatctgcccgtttgcggtcggtgtgttggcgttctgaggacgcatgaagccatatcgttcttcgtccgactcacccaaaatctttctggagaagaaatccgcgtcacgaccttccaatgacttgacggattgtccgtctacagaactctggatggatgtctgtgagaagaacttaccacccttctggaagtcgaacatgacagagaaggagaaattacccaaacggaacacgttgttccagccacctcgccagtcagcctgtacacagcctaaatattcatagtcctgtccttctttcggcgacccgtcgagctgacaaaggatgtatccttcggcatcgcgtttaaatgtcttcgcatagatagcaccgtagggcttgcctacttccgcataagacttcacgttgtacacaccgctaccaatctgtatcttgtcgataccttcaggcaatgattctaccatggaattgttctttgaccagttgaaaatggttttccactcgaagttcttcactttcaccggcacaccgctcacggagatttcccaacccttgttggagattttaccggagttgatgattacacgctggtaattggataaataagaaagttccgactcgacaatctgatcacgagtgtatttgtcatagtaagtaacatctgctgtcaggcgtccgtccagcaaacgaacttccgcaccgatttcttttgagatggttgtttccggtttcaagttcggattcttgcgtacggcgtcaccctggaaccacgccatgtcattacggaacaatcctccgtaactgtaactgttaatcaaacggtcgaaaccggcatcgttacccacgcgggcaatagatccgcgcaacttggcgaatgagaatgtcttgctcttcagcttggggaagatttccgtcaacacggcactggcactaccggaagcataaaagtaagaattgttggctttcggcaaagaacttgaccagtcgttacggaaagttccgtctacaaacaaaccatgatatcccaaagacaacataccgaatacggactgcttctctttcgcgttcacactttccgtcccactcaatattgaggcattgttggacaatgacttcacatccggagctgccagttgagaaacctgattccagagtttataccagtcattcttttgcatagaagtacccaagttagcactgaggctgaccttcttgatattgcggttataagaaataactccttcatagttgtagttgttggaggcctcacggaaagtttcgtactgtccgtcgatatcccacatggtataataattgtcgaacttccaaccgttcttgtttgccttttctacactggcacgcaaacggatattcattccctgaatcggtttgatattaagagtcaggttaccacggaagttattacggccgtcaccattgctgatttcgttcagcagccagtaaggattgtagaatccgttaccacgcgtgaaggcttcacctgtctcgcgcttccacggcaataattcctccataacgacgtcacgcggcatattcatgatggcacgcatcgggttacgattactgtcccctttaaagtcacggttatcggctgtttccagctgatagttaacggagatttcactggacagccatttagccagatccatattcacacgcaggtcaaatgtgtgacgcttcatgttatcaaagttcttcagcattccgtcgtagtcgatacccgtatagttgaaacggatacctgctccattgaacaccttattgaccgaaacactatgagtcatggctacacccatttcgtacatatccgtgataccatccttattaggtacataagaacgtatctgattattacgtcccaccaggtcaaagcctaacatcggcaacccccatgagcgttgattcggattcgcccagttaaatacaaaaataccataaggcaggctggggtcataagcataaccgttctttgagttggaaccataatagttgaatccgtcacccacaccgacagccggaaggctggccgaaccataaacattctgataggcaggaaattcacgcaagaaagtaaactgcatattgtagccataagaaacaccgagtccggatttcttggtagctttacgggtagtgatcagaataacgccattggcagcatcagatccatacaaggcagccgcattggcacctttcaaaacttcgattgattcaatatcgtccgggctgatagcagaagcaggattaccatagtccaagtctccatcttctcccatcgggttcatgatgggcacaccgtcaattacgtacaacggctggttatttccggtcagggagttgttaccacgaatctccacacgggtagaagacaacggaccgccattcgaaataaaattaacgcccgaaactttaccgctcagactattcaataagttcgggtcacgtgtatccagcagagattccgtgtcaatggactgacgggcatatcccaacgatttggattcacggctgatgcccaatgccgtaaccacgacatcgttcagttctttgacatcctcacttagaacgatgcgcagcagatcattgtttttcaaggtagccagtctgatagtctttacagcatagcctatgaatcttacattcagaatagcatctttcggcacattgttcaaggtaaattgcccctccatatttgtcgcagtagctaagttttggtttccaaccaccgtaatattagcacctggaagcggatcaccaaactcgtcaacaacgactccagtgacctttcggttttgcgccgaaagtgaaagtgcgaagaacgtgagcaataccatcaggcacgtccctatcctccagcttcttttcagataaagtttctccatattagcttaagtttataattaataaatttgttcttttcatttttctacagtgatggtgaagtagttcaaatcaggtttgcccgccacaatgttcagcacagtacggcgccagccgttcacatcgctcttcatggtgaaagcgtcgacagtaacccattcgcctccggtagcaggaagttctacgacaggaccttgtcttcttttcgtgccttcgccaaagtcaaaacggattttagcatcttctttggcagcataacataccttgactgtgatatctccggcagcataaggcagttctttccattccatccactcacccgcctctgtgctggtgacataccattcggtgttcttatccggagccacaccggctattttggcaacatccagacttccggtacggtattgattaccgctattcttagcagatacatcgaagaagtaatcgcaggcctccatttctacacggaatgattcggcccatgcccgactgctactgtatttacggagaatgttcagacgctggttgggaaagtcatagtaaatgttatcggtacttctccaataagcggcattctcggccatatcggtaaaaccttccaggaagaccagatcagcattcttcgcaaccatatcgtccaaagcatccgttaaacgtttgccgtgatctgcatcaaaaaacatacgggtacccgatttatcattggtatagaaagccggaacagccacacctacagtttttccattgaaggtacgtaccgtccaggaactacgggtgggagcctgctcagaggcaataaaccaatcgttcagtgattctacgactgattcgtccacctctttatcacggtcctgaaaggctctgtcggcacaaataaagagatcttcgccataagcagacttgaagtcagcatgaatcttgttcagaatagtctttaatttgcctttacagtcaattttcttgttgcccaatgcagcatagtctacattaaggaaaccattgatgctccacaaaaacaggacaggtttgccgtctatgcgaagaagatacttgttattggctttattctcgccataaaagttatcgaaggccagttttatattgtaatcccatatatacttatatatatcgtccaaattgtccagcggatacatcacctcttcatcggtcagtcccttgttttgctgagtttccgcactaatgaatgtagcataggtctgatacaagtcaaaattgcgggcagccgcccaggaagccggacagtcatcgaagatggcaatcttcagactttcttcattccgacgctgtaaagcagcaatgaaatctttgatacgggtaggatcgccatgatctctgtcataagcaggatcagtgtcggccttcggcaagcgtccgcggcaattgggagctacataatccaaaccactatacaccatctcttctaccaagttatcccaccactctgtttccgtagcaccaaaagacttcacttcgaaaagcggcttattataaaaggtagtagaactagtcccgccactggcagcatcttctccattgcggagattcttctgatagctgaacagcgcccccatcaaaaaactatgttcgggaatattactctctaccgcaggagcagggagtatgaacgtcccttctgtcggtataaccgggtccggattagtatcaggaacaatagtattgtcctcatcagaacagctaacaatcatggaagctaatacaagccccatcgtgattttcaaataatttttcacggtctcttttttatattatacatttgctatttgttacacctcgaaaacaccctttttatctattatttaagaaagcgtcgactgaacaaacttaatatttaaggttatttttgagttctgatgcaaagtaacaagagcctgcttaagattttttataaaatacgattaaactctgattaatttctaattaattttaaaactaatactatcttcttataatttttcgcaatcttaggtattaatttcaggaaaagggggaagttttatatcctgtagtatgctgtccacaccctatttctttatctaaatgagtattcacttcctgcaaaaagaagaatatttcaagtagaaaggctaaaaaggtaaataaggcaaatactatacaaacataacacaaattaggagatatccaattagtgacttatccgattatataagatgtggatttttagtattacaatggcgttattcctgatagattttcaaagcgctccccatgatataagctttaagttgtactattccctatttctcatataatataagtttcctatataataaggtataacaggaatatttataactacagctaacttttattccctcttcagcatacttatttgcataaattccacatttaagggatatttaataatcaattaagcgaaaattaagctctcacttaactatctgtctctatatttgccacatcatttttcgtgatcaacccgtgaattacagtctttgccaaatcataaacttaaatacaatgaactttaaaactacaaaatcatatcatgaaacaaattagcaaagtatttttagcttgcgcctgtagcctgtccggtctgacaacgcaagcccaagatcaaaccgtatggagcaatgatttctccaatgcctcccaaccactgaatactgtgggacgtggtgtctgtcgggtgaacgacggagtatttcattcgcgcagcgcttatgcccttttcggcaatcctgagtggaaagattataccctgtctttcaaggcacgtgccccgaaagacgccgaacaggtacagatatgggcaggcttccgtacacataaccgctttgaccgttatgtggtaggtatcaaaggcgggttgcaagacgatctctacctgatgcgtaccggatatatgggtacagacgaattcatgggagtccgtccgctgggctttcaccccgtgccgggagagtggtacaaagtgaaagtggaagtatgcggtaaccgtatccgggtttttgtaaacgacgaaaagcttcctcacattgatttggaggacaaaaacagcaacctggctcctaccggtgaagtagcactgggaggcggatggatagatacggaatttgatgacctcactgtcaccccattggcagaagacgctctcaaaggtgtcagggttgaggagtatcgcatggcactcaccacacaggaaaaggaaaagaaacgcagcgaagaacgggcgcaatacacctccgtcaaactagataaactgactgccgaccgcaccgagctatcactggacggaaactggctgttcatgcccgactaccaactaaacgataagacaaaggccatctccatccagacaaacgacaacgactggcatataatgcccgttcccgctttctggaaccctatccgcatctggctgcacggagaaaccatgccatcacccaccgggccacaacataagggggtatcggacacctactaccaacaagaaaccgaccgatgcgagaactatacgttcaactaccggaaaaccggtgctgcctggtatcgccaatggctggaactgcccgccgacgtgaagggaaaacagctgactctttcattcgacgccgtatccaaaatggcggaagtatatattaatggcgaatcggcaggttccaacatcggtatgttcggtgatttccaagtagacgccacccgattcctgcgtccgggacgcaacctgatcgcagtaaaagtgacacgtgacatcaacggaaaagccgcacaaaccagtgacgccatggaaaactactattcgtcagtacgcaaggaagtggaggataaccagaacgaccagcaggccaacaaagccgtattgacagacatccctcatggattctatggtgataaccctgccggtatatggcagcccgtgaaactcattgtcagcaacccgctgaaagtagaagacatctttatcaaaccggctctggacggtgcatcaatagatgtcaccatcaaaaatcatgcgcccaaaaagaaaaacttcgatatccgcatagatattatagataaacagacgggggaaacactgtacggtgcacctgtacgtagcaaactctcattagcgacaagcgcacaagaaacatttacctgtgatatcaaaggactgaaacccaaactttgggaacctgccactcctaatctttatgattttcgcgtgagcctgacggaaggaaaaaacaaagtgacggactgcatcaccgtaacttcggggttccgcacgtttaaaagcaaagatggattcctttatctgaacggccgcaaatattggctgcgtggaggtaaccatattccttttgcgctctgtcccaatgattcgctccttgcagacaagttcatgaaactgatgaaagaagggaatgtacagtctacccggacacataccaccccctggaacgaactttgggtgtcggcagcagaccgcaacggtatcgctatcagctttgagggcacttggtcgtggctcatgatacactccaccccgataccggacaaaggcgtgctcgatctttggagcagtgaatggctgcgcgtgatgaaaaagtacagaaatcatccttccgtattcttctggactgtgaacaatgaaatgaagttctacgatctagatgccgacacggaacgtgccaaacaaaaattccgcatcgtatccgatgtagtgaaagatatgagaaagaccgaccctacacgtcctgtatgtttcgactccaactatctccacaacaaagccagcaaacgctttggtgatgactttctgaaaacagttgatgacggagatattgatgacaaccatgcctactataattggtatgactattcggtattccgcttcttcaacggagaattccagaaacaattcaagagtcccggacgcccgttgatcagtcaggaaatgagtacgggttatccgaatgctgaaaccggtcatccgacccgctcttatcagctgattcatcagaatccctattcattaatcggatatgaagcatatgactgggggaatcccgccagtttcctgaatacacaatcgttcatcacgggagagttggccgaaaccctccgccgtaccaacgaacaggcttcgggtatcatgcactttgcctatatgacttggttccgtcaatgctatgatcaccggaatatacaaccgtatcccacttactacgctatgcagcgtgctatgcaacccgtacttgtcagcgcggaactatggggacgcaacctttatgcaggcgagaagttacatacacgtatctacgtagtgaatgacaatgaagaaggacgtgacctgaagcctatgtcactggcatggagcattgtagacgaaaccaataaggtactggcttccggcacggaacaatttccggcagtggaatattatggtcgtaaatatattgaaccgaacatccatatgccttccaatttaccggcagacaaggttaatgtaaaactgaaactcactctcaccgaaagcggagtcactttatcgcagaatgaatacggattattactggcacgcaaggaatggaacatcggtcagataactgccgataaaaaggttcttttactggataaggatcatatgaaagctacccttgacttcctgaacatcgcctgccagacagtaccgtctatcaaggaactactgaatgccaagcaaaaagctaatctctgcattatatcgggcttgaaagaatgtaccgatgaagaagcaagattactgcgtgaatatcagtcaaaaggcggtcggattctcttcctgaacagcaaagaggcagcacaaaaagtctatcccgaatatatcaccggatggattattcccactgagggagacatcgtggtgatggaacggaatgatgcccctgtattcgatggaatcggtgcactggaattacgctatttcaataacaacaagcgtgaaattccactagcttgcaccgctacattgaaagctatccgccacgagaatgtgaaggaactcgccgcccaaatgaagatccatgcttatatcgacggtggtaagccggaggaacgtatcgcacgtatcgaatctatgcgcggactgacgctgctacagatagccgacaataaaggaaagtctctcgtttcaaccttatgtacagagaaggcaaccactgatccgatagcaggtaaactgctggtaaacatggtgaatgaattattgaaataggtatgtaattgatatcattgagtggagtttttccattcttcctgcccgtcttcccattagaggagacgggcagttttgtttttaattataatcgaagttattagcaaagatgttcttacaactgcaatctctgagttaattcacaaaagataagaaataataaaaacttcccaattcagtagaattcttagtgtcttcattgagaactgactaaaaagtcggtagtatccacattctcctccttcgggaaggaggagtggtcgaagaccgaggtggtaggtaaaatgatgtgtattcctaattttattgtaaatgaaataggagtgcattcacctaccacctccccctacgggtactcctccttcccgaagagagttaagatactaccgacttttagtcacctccattgtagatactaccgctttttcagtcaacctcaatgaagatagtttcgacttttaatcaaaccaaagaacaagccttatccaaactattcacatctttattctattgaacatagattcaaaccaaaaggcaactgattcattgcgaatcaattgccttttggtttcagtcgttaatagttgtccctggacagactacattacctccttatacacttagttttctctttataaagaagatacgtttttaataatatacgttttacccttcacagtagcaaaagagatttgatcatcagcaagtacctttacctttgctccagaaacgttcagctcctttgcattcggatatttaatcacacattccgcaccggaattagaaagaatctctatagctgttatcttcccgtcagtccatgccgcatctacttcaaagtttcctctcgctttcattcctttgaatgagccatttttccatgcatcgggcaaagcgggaagcaattcgatatatccgccctgactttgcatcagcatttctgcgataccggccgtacaaccaaagttaccatcgatttggaaaggcggatgcgcatcaaacaaattagtatatacaccgcctacatggcttccgggaacagtcagtttcatggcacttctcaacagtttatgagagcggttgccgtcatgcagacgtgcccagaagttcagtttccatgctttgctccacccggttccttcatcgccgcgtgtattcagcgtcactttcatggcatctgcatatttatcgtcctgttcgcttcttccgattacaatctgcgaacccggatgcaaccagaaaagatgattcgtatgcctgtgtccgccatctccggtaacatccttcgtcacttcatctttccattccataaactgcccgcccaaaccgattttcggtccggagagtttgctcatagctgttgctatctctatgatttcagggtctttgtcccttcccagttctttgctggctttgatcatcatgtcgaacatttcacaaatcatagcctgcgaagttgaacagcccagtgagaactcaccatgttcgggagagtgggacgggtttgctaccagtgtaccgtcgcgttcgtctgtccaaagattgtctacccagaaaagagcagcatcgagcatcgtatcataatactttttcaagaagtctttatcaaggttaaactgataatactcccagatatcctgacacatccatattgcccctgccggaaaatgatggggtgtacttttcttggcaggagccgtattgccccaaatattattctcatgatgcgtcacccagccgcgaacattgccaccatcgggtttgcaataatattgttgcgctgtatactttccacgaggcaccagacttctgacatactctaccataggcagatgacacggactcagattggtaggctgtgtcggccaataattcatctgtatattgatattcgtatggtaatcggcattccacggattggaaagcctttcaccccatactccctgcaagttggcgggcaaagaaccttctcgtgaagaagatatcaaaagataacggccaaactggaaatacagcatttcaagatactggttttcctgttccgagttggtattctcgtccatacctttcagcaaactgtccgtaggggcaacaggtgcctccggcaagttaccgagattcagtcgcattctgtcgtataacgaatgatagtctttctggtgggtagccaacagagccgtgtacttcttatcagctactttatgcagcgtagcctgcactttttccaacggatcttcttgagagaaataattgtaggagtcgtccatacactgtacatagtttgtggcggcagacatcagaacgattatttcatcggcatcctctactttcagcttcgttccgtccactaccgaaatctttcctcctttattcttcacgaccagttgctgcgcatatttcagtccattcttccaggcatcccctacccgcttgtctccgctgaccggagtcggatatcccgtcatggtaatagtatgaccgtctgccgtaatggttttatcggtatgcagcgattcaagagaaatgatgcgtgaaagtttgcccttcttcgaatctgaggtgagacgcatcaccattacattatcgggataactcataaagtattcgcgcttaaaggtgattccattctccttatacatcaccgtatgaatcgcattatctatatcgagcgtacgggtatagtcggaataaggcagttcggtagaggcatctatcgagagttccgccaattgcggtttctgtttattatcgattaattctgtgatttcgagtttgaagaaggtgtatttgtccgtcttcaaaggaaaagacagggtcttattgcggcttccctttccgtccttatcatccccccaaaaagtaccggactgctgatccagcaagtcgtatgattttccgtctgccgaaccatagagcttccatgatttcggatctctgcccggcatatcattggcggaggtcaggctataggaaacagccttgggagcatgggtatatgcccacttgataacgcatggcaggcttccaaagctagagaaccggtcgttatcggcaaaccatttgctggtagtgctctgatcgaaaagactgcctatcgactgactttgattctttgtattgtcataattggtctgcactgcttcttttatcaagacggggatacccggattgacagtctctacaatgatattgctcaatgtctggaaagaaccgaaatgctccttcgttccagccagattatcaatcagattccgcaattctgtgccgtcaccgtctccatcgtagttatgggtaatcaactttccattttcatctatatatgcagaacggtttgccgtaaagtcgttcatcttctgttgcaacatcacccgtgccttgtggagataatccttgttcacttccggagttctcagatgtcctccattgtaagacggatcttcaccggggcctcccgaccacaaggtatgttcgtttgtctggatgacatctacgtagacgtcaccaaaaatcatggctcccatataaccgttaccgataggcagagcttcactttcccagtttttggcaggcttattataagttgccttcaaggtcggctgataaggctgttcggagcaagccgtcatcgtagttcctgccacaaagctaagtagaaataatacatctgcaaaacgcaaatacttgtttctcataatactaaattttaagaagtaatgccttaagattgccccatactgtgtcacgcttgtgccaccctattggcacaactgtgccaaaggcttggcataacagtgccagtgcggtggcacaactgtgccaatagggtggcacagactgtgcaatcagaaggcattacctcagtgaatgtaatcttaatcttctttccggttcaaatttaaataaagtctataaatcaatgactgtttgcagacgaatatctttggaagaagcaccaaccataacgtcaaatgcccctttgggtactacaaactgtcctttttctacatcccaatagcgaagttgctctttattcaacttaatctctacccgacggctttctcccgatttcaaaggaacacgacggaatcccttcaattctttcaaaggtacaattcctccggtctccggtatccgcacataaacctgagcaacctcatcgccatttctcttaccggtattctttaaccggaatgaaacggtgacttcaccgaccccgtcttttacttgcagatcgctgtatgtaaaagaagagtaactcagtccgtagccgaacggataaaggacatctcctttgaaatatttataagtacgccctttggttatatcataatcatcaaacggaggcagttcatccaaagacttgtagtaggtgagcggcagacgtccggcaggattataatcaccgaacaatacttcggccacggcggttcctccctgttcacccggataccaggcattcacaatggcaggaatatgctcgtccatccagttaatagccaatgaactgcctgctaccagaacaacaattatgttgggattcactttatagatttcctgcagaaactctctctgatctgccggaagctgaatatcataccggtcctgtccttcacgctctatcgatttattgatacccatcacagcaactaccgtttcacattcgcgaaccgcttttccggcttctccgtacaaatcgagacgagttgccttgcctatctgcggaactttccattgcaactttacaatggcataatcccggttatcataatattccgctttcaactggtattcttttcccgcttcaagataaatggaagcggaatccgtagatacggcatgtgcctgccacgcatcaatcagcatctgattatcaatgctcaggcggcaaccatcatcggatgtaaagctgaaagtatagcgaccggaaacggtcggtttcaactttcccgtccaacggacagacagcggagatttgggcaggaacggatcgggagcctgattggcaggttcaaagttgatccaactctccttacgcactctcggggtgccttcgaggcgggtattgtcaaaatattcagcttgcagtccttccgggaagttctctccctgaataagttccagcccatcggcagcagatttccagggagcatagacgactttcacccgatcgcctaccctgtttctgataccttgcagtatggaaaccggttctactaccggagcgccgctgtaatcgccaaattcacatttgccggcattgatgccgactactgcgatcgatttcagtttgtcagcattcagcggaagcctgtttttctgattcttcagtaaaacgatacattggcgggcagcgtccagagctatctgctgatgttctttcgaaccgatcactgacggagagattttagtatacggatttcgttccccgctatcaaaaagtcccagtttcatgcgggccgtcagcacatgataggcggcggagtcaatatcggcatccgataccatatattgtttgtaagcattcaataaggggccgtcatacacatcgtcaccgcattcaaggtcgagtcccgccttgatggataaagtggcagccgcctccttcgtctttacatatttatgggcattgaccagcaaggcaggtccgccacaatcggaaacgacatatccctgaaatccccagtcctgacgcaacaccttttgcagcagccacggattcagcgtgcagggcacatcattcagcgcattataggcggacatgatggaagcagcttttccttccttcacacacatttcgaaagcaggaaagtaatattcacgcagttgtttctccgatatctgcggattgcagacaaagcgattatgctcttcgttgttggcggcaaaatgcttgggagtagaaacgattttcaggtaatgcggatcatctccttgtagtccgttcacaaaggctgttcccattattccactcaggaaagggtcttctccatacgtttccggggttcgtccccaacgcgggtcgcgtgccatgttcacggtaggcgaccagaaagtcagcacatcgctgaattgttctttctgttctcttccctgatccagctcgttccaacgggcacgcgcctcatccgagatcactgtagctacccttttctgcaactccggattccaggttgctgccagtccaatggcttgtggaaatacggtgaaacgtccgggacgtactactccatgcaatgcttcattgccatgatagtatttatcgatacccaaacggggaatgccgggagaagtggcacgaagcaaactgatcttctcttccaccgtcaaacgggaaatcaaatccattacccgttcatgcacaggcgcattttcattcttgtatagctcctgtgcgtgaacgaatgaacaagacaaggctgacaacacacctgtcaacaaaatctttttataccttttcatcatgatcatttttctaccttatttaataacaaacatggtaagccccgtactctcccccatcatttatcccagctgtccgtgcggaaaggagatgccggcaagcctttctcgttatacaggttacaacgggggctattggaaaatccgtaacgtacggcaagaggtacagccacttcactgctggacacaatcaccttatttccttcaatcaccgcatccgcccatacaaacttacggtccgctcctgcaatgccgaagcctgtcagcttcgtcggtttcggatgaggcggttttcctgccgggatgtacggagaagttcccatcaccaactttttaccctgattagtaaactccagaatgatcttatttcctttcacagacatctttttataaagaggtcccatgccgacaattttctctccgtatgccagctttcgggcagcaagagccagccggtgtccgacatcgtatttatctaccggatgcaaatcgaaaggatctcctacatcgattgtcacagccattgccgtgttgggcagattcaaggccttcaactgtccttcccgtacccagcgccagccgtttccttcgacagacggctcgggatctaccggttcgaaattgggaagctgcacatatacgaaaggaaaatcaccgattccccatttctctctccaatccgtaatcatccgggagaacagggtagcatattcttttccagagccgccggagttaaattctccctgataccagatgactccctttatactcaaagggattaaaggagaaatcattgcgttaaacagattggacggaccattatttcccccattcggtttacgcggattgggcggacggggaacgctgggctgtggtttgggaggagccggctttccagctgcttgtgctgcctgcacagctatcgcccattctttttgtgcctgattccattcttttcctaccgttttatcccattcccttaccgcttcatcaaattctttctgcttctgtggataagtggcgagtatttccggattatctttcacattcttctcatacgcagctacatagtgagccaaagccggttcttgtttcaatccggaaagactggtccaggcttctgcacgcgtacctccccatgcagactggataactcccaacgggcgtccgtttgcagcacgcatatcacgtgcaaagtaataagctgtcgccgaaaagccctgtccattgatcttagccaacatctccggtgtacaaagcacccatctggcagcccgttcggggttagatgttccctgaggaacttcaatatcggtcaatggctctaacgacgtgttcttgggaacaaagaacaaacgcagcaaaggatcttccgaagcggatatatcgtcagcatattcttttcttacctttattccccattccatattcgattgtccggaagcaacccatacatcgcctaccaacacatccgagtagacaagtttgttcttaccggcaatcgtcagagtctgcccttctttcttcgtttttatcggtttcaggttcactctccatgttccgtcagtgtcagcagtagttttcactttctgtccggcaaagactacctctacagtttctccggcatcagcccatccaaagatggcaatctttgtgtcttgctgcaacaccatgtgatcaccgaagatcagcggcatccgtacatcggctttcatctttgtcagcccaaagcttacggacaacaagaatatccataatatgaaaagaagtcgtttcattgtattaaaagttaggggaataaattagtactacatagacaccatcttgtatttggtcgtaaacgctacaggctgcttattctcttttgccagcttgaacggaatcagtttttcttcacctgctcccagttcataatgaacggcatctcccactttcttaccatccacaaacatttccaccttaccgatatccatcaacgtacctgtatttttcacactcacccacactgtcttctgattcttgacaaggttctcttctaccttggacacagcaagatcgaaattggcaccaaactcatgtgtataattaagcattcccgtgacgcctttcttgttatcactatagcctacactatgtttgatctcatttttagctacgtaatcgggactcattccgcctaccatgattttgaactctcctttttccacgactctgtccatccggtcattgagcaatgaaatatcatatggagtcatttcaaacgaaacagtcttcgattctcccggctgcaaatgaatacgggcaaagtctttcaattccataacacgggttttcacactggcatacatatccgtcacatatagctgagcgacttcatcacccgcacggcttcctacgttcttcactgtagcctgaacttccacattgccattcgccttttcctgtattttcagattagaatattcgaacgaagtgtagctgagtccgaatccgaagcggtagagaggataatattccatgtctacatattcgtaacggcgtcctgaagtcttgaagttataatacaaaggaagttgtcctacgtgacgcgggaatgtcatcggcaggcgaccggcaggattgtaatcaccaaacagtacatctgccatagccggaccaccttcttgtcccggcaaccagtttaccaagatagccttgcacatttcggatgctttcagaatatcataaggacggcctgcctgaagaatcagtatcaccggttttccggttgcacagactgcttccagcaactcctgctgtttgcccggaaggattaaagtcgcccagtcgttattttctccacatgtcttacggacatcattggtcgcttcactggtagagcagtcacccagtaccataatcacgacatctgattgggaagctgccttcacagctttcggaatattggtttcgtccggattggtaaagtcacatccttgttcataaagaactttggtctgcttgcccactgcgcctttgatacctgtcaataccgatttcagttgtcccggaagcaatttcggagtgtaatcgcccggctgcaggtcatctgcaccgggacccagtaccgcaatcgtacgcagtgtctttgacaaaggaagaagattgtctttgttttccagcattacaattgattcacgtgccgcctgacgtgccatttccttatggctgtccgagttccatcccgggtatattttcttccagtccagtggtttgcaaggattcttttcaaagagttcgttgcggaacatcgtacccagcatcgtacggcatacattgtccagatcttccatattgatacgaccgtcttttgccgcctgaatcacttctttattattgtaagtatcaccgcaattggtcgcaatgccggcagccaatgcctgattggctgcttcaatcttatcttttgccgtgtaatgtttacgggctgtcagatttccgatagcgccacagtcactgacgatgaatccattgaatccccattcctgacgcaatatctgttgcagcagttctttgctcttggcaaccggaactcccatataatcggaataggccatcatcaaagactggcagtcataattacggatcgcatgacggaacggaaccagatgaatctcgcgcatttcacgttcggacagtcctatatcatgtgagtcacgtccacccaacggggcaccatgtccaccgaaatgcttgggagtagtaaacaatcctctggactggtatcctttgatccatgcacctcctatttgtgacaccaatacagggtcttctccaaaggtttcttcacagcgcccccaacgtgcatcctgtgcaacgtccaacaccggcgaccatgcctgttttgtattggcagccactgtctcgtctccgatcaccatagccacttcttccgtcagcttcctgttccaggtagctcccatcgccaaagcctgagggaagatagtagcaccgctaccataagagaaaccatgcaccgcttctacctttgtgataggaggcacgtacaaatgaggaataccgggaatgccccatccttcacggatcagttccattttatcctccggcgtcatcactgccaacaaactttccacccgttcttctactggcagtgacgcatccatataccgacggtcagttacttttccctgactgtccgtcaataccttttctgccacaagaaccgaaatttctttcagagagaaaggtttatccaactttcccgacttaaaattcagcttgacgtgtgcaccgtatttaggagtgaatttgactttcatctgtttgtcgctcccttcgatccggtagttcacgggagttcccagattcatggggtcataagtgacaaagatatccagtacttctttcagttcattcttattgataccctgcatctgaaggtccagttcacaaacatctccgggctgctgaatggtaaacatcagccattgttcagcctttagtgcctgagaagggattgtccacatcgtttttacattcctgtcaaaggctaaagcagcattttccgcatttgcagaagcagataccgataatatatcactctgttgctgtgccattgctaccgaacatgacaataaccctactgccaatatccatttcattttgtttttcatgctatgttcgtttttcaactattataaggattctatttatcaattgcctgtgtatggatctatctgttatttagtttgcttcaccatttttatagtgccgtccggattgtagtacagtttgtccacacagatagagcgcagccaatcatgaccggacaatgcactgttgtgatagaaagaataccattgtcccttgaactcgacaatagagccgtggttggtataactatcggtgggttccatgtaaattcccttgtattcccaaggccccaaaggcgaatcactgatggcataacacattcggttatgcttttctccgtcgtcgtgattatcagaataagacaagtaatattttccgttatacttatgtatccaggtcgcttcgtggaagtctgaaagtccctccatagtccgcatgggcccatccagttctatcatattatctttcagtttgccacctttgcaggtaccaccgccaccattgtagatataggcctgtccgtcatcgtccacaaatacacaaggatcgatcatcggatccattccctcaatatatccctgtactttgaatccctccgcaggcttgtcactggtagctacaccgatcttccagctatcattccagtctgtttcgctgggatgagggaagtagaaatagtaggtgccgtttctgtaagcacaatccggagcccacataaaacctccttctttccgtccccacggcacttggtcggaactcaggatttctccatgatccgtccagttaatcatatcatcagtcgagaatacatgatagcggtccatcaagtcacatccacgcggaggagcaatgtcatgagaagcgtacacatacaatctgccatcttcccatacatgcgctgacgggtcagcggtatacatatgccgaataaaaggattcggacttttcgtatccagctttgcactaaatgccacagctttttcctttcttaaaatcttagcggcttctcccaccaatttcaaataatgatcgctttccacgccttcttcaaggggcacaaatgtacttttacctacgggaaccttcttagcacatttaaagatggccgtcccttcatctatttcatcaaacatagccacgtagatcatttcagcacccgcccgaatggctcccatcaattgcgtccaaaggaaagaacctttattgcggggaataaacgaattatgatctttccccttcagatttccccatgagaaaccggggaagaccagcggagcataatctacctgattcttctttgcccactgaatatcttcttccaccagtttctgatacttgggataagtcgtttcattataacgccctacaaaccaaggcatcatgatatcacattttcggataagctcatgcaggcggggatctgattctgtgtccccattcagtgtacgccactgcgtaggtactccaagcatcacactgaatccctgtgacttcaagccgtcaataatatgagcggcttctttcagcccatagcgacgattatcattaaatccgactccccaaaccgtaaccagcggtttaccattgtgatacagataagaggggttctttgcatggtcttttaaagaatagcgttctgctatttctgctatgtctttcagcaacaactgctcttctcccggttgcatgccgctcaggtcgtacatcacacagatagcccgttcgtatttattggcaaatttcatcgctgaattcagtactttattaaagtgtttcaatccgctttcgttccgtatctccgtaataaaacgctgcataaatactccgtccagtccatactcctgcatccatttaaaatgtacatcaaccgtagattcatcatgagaagaaaaaacataagccggtttaccgtcagcaaaggaaaactcagtcttatagagtttcttatactccgacacttcaggccaaaggtctaccgagcatgaccccggacgaaaaccattacgtccattataatgatgccaaccacggcccgagccgtcaccaggggtgttgaaccacccctgataacctgccatgaccaatcctttgtaagaattatactgtttcccaccggattgtgccatcacccctattgaaaacaataaacacaccaacaaccaatcaaacctttttaccatgttattcttttatttttcatgttatgttattacgtctgccaaaaaatatttttcagcaaagtaaaggggcatcccttaataaataccacaaaaacgaattaataatgacttaaaatcgaattaattgaagaaaaagaagagtattcgtagaaatattatacagaaatatataaatatcacagatatagtccgcattcttcgtgcagactatcagccaaacagggcatttattatttatgcgaatcagtagttggattttgttcgttttcgattcagatttgaatcaaccgccgattcgcattaatagctaataaagcgaaactaagaattaagtccgaagattattcttctcctgacctcgtaaggaactcagttcaatgacacaaaaagagaaaggaagtagtgtagcgataattcatcgatttacttagaagatacagaacttttcaacatcagcaccaacatctgtacgaaagacattgactgattatgcagtaactcccgatcatttattaataaattctttcaccgtttattataaacgtcccccaagtttattataaactcgaatttcgaacttgctgcaagaaatatcaattttaggcaacaaaaagggccgcaattcccataaagaatcgcagcccttagcttgtaccagattatctgacaagcattacccgaagtgggaatgcctgcaatctgttattatataatacttattatcgctcatttttcgtctatattatcaatgttattgaattttcttccggtttctatttacaaatatacaacataaaaagcggtttgtcaagtcctccatgcttctttcatacatctgattacaaatcgtacggttttggttcaactgctgattcacattatttacttaaaattcaaacagatttcttgcgcagtcgtatccttcctcataaaattccgtcagtttctgtacatcccgttcaatccggtccaccatcaccggtttctgcggacggataacgatgatctttccttcatcttccatctgttccaccatttccagctgttcattgtaaactgcacaccgacgactcaatgcttcacgcaacttcggatatttccggtacacaaacgatggaatacggatatctttcgtgtctttccggtaaccacgattacgggtaagtataaccacattacgggtgtaaccgtccgcaatagctctctgcaagggaatagagtctacaatgcccccatcaagcatcggaacaccatccacataagtgacaggacaaacaaaaggcaggctactggatgcccggacaatatcaatcacacggcttttatcccgtttctcttcaaaatagttggcttctcctgtcatacaattcgtggttaccatcacgaaacgttcgggagaagcaaagtatgtatcataatcataaggaagaatatgttcgggaaattcgttgaaaagtaaatcaaagtcgagaatgttacgcttcctgagcagatgtttcaggccgatataattgtatttctccagcaggtcaatattactgaacttggcacgaccacgctgacgggatgcatacgacaagccgttacaggctcctgccgataccccgatcgcataaggaaaacgaatatcatgatccattaaatagtcaagtaccccacaagtgaatactccccgcattccgcctccttcaagtactaaccccgtatgttcatccaatttcaagtctttcatttttttctcccttattcttattccgacgaataaccagcaatgatgacaattcccgcatcacaagctcatcctcggataattttgtataggaaagatggctcattaccagcaatccatctctctctttggttactaattcttctactcctgcaaaccataccactactatctgatcagcataatgagccaacaagtcatctatgcactgatgaaactcttcatcgtccgtttcaaaaaggaaaaggcgcaccgaatgaccgttttgcaacattatattcagatacgaaagtaggaatacatcaatcattcctcccagaacaaagctaaccagtgctccttcccgataattacgattcacaaatacggcaacaggacatttcacctgttccattatgtcatcaatcttatcacggaagagcgtcagccataaaatagctcccggagttcccggcatttcgggacggtaatggctaccggctcctaaaagcaacatatcaggatgctctttgcgaataaaatgaatcatctcctgtaccagcttatccgtcacccgatagtgattgtccacctgaatattcagttcgacagctctttggttgagtaaagcaaagctttcgctttcataatgctgggcatccaacggattcaaatccgtacccactgtataatgcgctgcaatcacatgttctttcttcaactgcttcccgaataacaaatcataaatggaaagcagactgcgcccggactccgggcgaccaaaacaaaatataagtttgcgcttcaaagataacttttcttcccgatgtacaaagaaacgttcgactaaatgtagcagcggagtggtcataaaggttgtaactagcgccataatgaccaaaattacgaaaatagacgggggaagaactcccatttcgtaaccaatattcaatgccaccaactccatcaatccgcgcgtattcattaaggtacccactgtcagactatccttccatgactcacccaccagacgggcagctatggcacagccaccgagcttaccgactatggccacggtcaccagcagcaaacacaccatccacaactccggactattgatcagacctatctccgtacgcaaacctgtgaaagcaaagaataacggtaggaagaaaaccaaagaaatgtcttctaccttttccatcatcacctttcggaaacccagattcgacggcatcaccactcctgccataaacgctccgaacaaagcatgaataccgataatctctgtcagacaggaagaaatgatcagaatcaacaggataaatgccacaaacgttttattgatcgcctccttattggcatacacctctcccacctttttcagaaacggacgcacaaccaaaaacatgactgcaatatacgctacagccaatcccacagaatagagagcactggcaaagctacctgcctttgaaatagcaataacaacagccagcaaacaccaggcagtcacatcatcattggcagcagaagcaatcgcaagagtccccaaaggagttttggtcatatttcgttcctgaatgatacgcgccagcacggggaaagcggtaatactcatggagatgcctataaacaaggcaaaaggcagaaagggagtatgatcggcggcatacgtttcgtaaatccagtaagaagacaggatacccagaaagaaaggtactaaaataccggcatgactgatcaccagcgtttcatttatcttatttttcagcacactgaagtccagttccataccgataacaaacatgaaaaggatcagtccgacctgactcagcaattcaagattggtcagtgaatggacagggaacaggaaatgaaaagcttccgggaaaaaaagccccaaaacagaaggccccaagacaataccggctacgatttctccaatcacccccggctgcccgataagactaaacaaataaccgaaaagacgcaccatcaacaacacggcaataatctgaataagtaacgtcgtcagcggatgatgcagattatcttgcataaattgtagaaacatggcaaaaggcccgtcttgtaccgtgtttaacgtgttcgcagcatgatgtgaaaacctgtcgccctcttcaatagcaacataaatcaaccctccaaacagaaggagcataagtacataaataatataattcttccgggctttattctgcataaacttgtttttttgctatttgttgcataattataataaaaacaaacgaaaaaggcagatagtttggcaaaaatagtaaatattcaaacaaaatcttgtttttttgcttcaatctatgtaactttaggctagcttaattgttttaagtaggaaattcaaaaaaagtcctgcccgcaggcaagcaccatgagaatacagtttgaaattaaagaaaagttgccggaactcattgaggaaatcctgcattctgacaaatggcaaacttccgtgaaggaagaaatcagcggtcggacgaccgtcgtgatccgtgaccaagcgtatggttcagaagcaacgattgagatttacgctcaatccatcgaaatcaaaaccgcatggtcaaagtacttctatcgtatattcgttgccaacgatcttgtctggtgtgaatataacggtgcctatcgtggactattggaacaagtgctcctgcccaccatcactcctaaagaaagcctgcttgattctgatgttactgaaagttcactttatggacgtgaacataagaagttaagagaatatgccgaagacaacctgaagctgaaacaattccgccgggaaaacttcaacgaacagaggaatggaaccgcagcattcgatcatcctaaacgggtttatgatgagtttataaaagaagactatgtagtgacaccgaaaggcaataaataatagaaaagggtaccgctgagggtacccttttctatattataaatgctctccctatccgccagataaagaaaacaccccgccagttacttcaattttgccttataagtcttttccgagaaagtcagattcagaaaaaaagaaagtttctgctctttaaatctccccgaattcaccttcagttgatctgtatatttcactcctaaagaaagcgtactgcggctacgaaactcaaaattaagtccggtactcagataataattcgttgtcgtcttatcatgcactgaaatatatgagttgcccatacctgctccaagcaataagcgtaccggtttactataagggttccccaatgtatagctgcctcccaacatcaaacgatgttgattacgaaaacttatactggaatgcgaagactccagccggctccagtcaacaaatttatagtcgatggaagccatccagcgcaacgtagtataagacgctccgaatccgataaactgcggcaaacaagtacgatacttttttcctttttcttcaatgcttccgctggaactgctactgctcaccacatgatcattatcctgcatcaagtcttgagaatatccatatacgactcctgctaccgccgaacggtaatgatccaacttataggtatactgtaatccgaaatcggcagaaatcgtatgtttatgcgaactattactttctgttgcactcccttgagtttctgtttgtgaaatacttcctcccacataagaaaagtttgcacccagtgaaagccctttccacagttcgtgcgcaacgctgatacccattttggataatcctccctcaccttggaaaagtgaagtcaccgtacttccgtccgtacccgccacatcctgatcgagcgatatggcataccctacactactgacaggagccataaaaatagctccataccaacggggagctatacggaatccaacagccaaattattaagattaccattcagagaatgattgctcgctcctgactgtgaatatttcagataagacccgctgacacccaaatcgaaaaagaaatactgcggcaataatcccgttaaagaagccggattggcactattaatcacattttctccacgcaatgcaatgccgactccacccaaaccggaataaattccgccttctccggtggacaattcaccgagtccgaacatggaaaccggagaactcgtcatattttgggcagctacattcaataagttcgcacctagtataaggatagataaaactcttcttttcatttcgtatatgtcttataataaatagtgagtgatacattattatcatggtcattcacagggtgtttgctatctcccagcaccactccctgaacggtattataaaaagcattgtcagagaggaatatttgtagcttctcacggctctcccccgctgtccccagattattctgaataaacgaggtgatatcaaacgaatagtgagtatcttcataatagacattatcttccaccaggcttcccgtttgcacagtatttcccgagatgtcagtaatgacactctgagtggcgttattctggtctgccgtataaagagacaacgatttcggtaatggatactttccgttatacgtacctttgataggatatagcttgagtactgcactttcaatggaaacaagccttccggtctgattcagattattcagatagggaaattcgacattgatatacataccggtcagcccttgcagatacacctgatgttcgctctcggaagaaggcagttcataatctgttcctgccttgagattctccaaaggagtattagtacggtcatgttccaccttggtgtagttcagtgaagtgctggcattgaacactaaggtctgttccgtaggcttctctttcagttcatgataataaagggtaatacaaaaactcgaatcgttcacctgaaagccgttaatgcacgtcccgttttcatcgggaataaaagctattcctttgaagaaagcccggaaacgatcctgagactccatacattcatcatcttccagcattaaattaaaccacttctttccccattcgtcaggcaggcgcgtttcatgtaactcgttccgatagccgggtgtaggacgtatagaaacagaaccaagatgattattctgattatagctaacgttggtcttattaaacaggtaaccgttatcttccagagagagtccttgcgataaactatataagtcaatacgatgatagaccagtgtatcccccagataatccccggaagtataccatttgaacgtgatagagtcaaactgatagtcagtagtctcattaagtgagtgagaaggtacttgatattctgcataaaacgaagtttttatttctccgtaaagatcatccttaaatcgcccgatctgacagatcgtatctcccgaagttgccagagaatcggctaataatgtgctcagagtcaccatacatgtatctgtcactacatttataaaagaactctctacccatttacttccaatggaagaagattcatccctacaggagaatattgtacaaaataagagtaatgaataaaaaagtgtaatgaatagtctcataatgaatattatttttgagttgcaaaggaacccctttaggaaagcatccccaaaattaatcgactatttcccgctatttatagactcggttttgttcgatagagaaaatagggctatttgtcgatatcttttttcttcaaccgcattgataactacatttgccccaagtttaaaacgtaataaaacgaatggaaataatgaaaaaactacaactgttattagtgtcaatagctatgctatccatgttctcatgttcagatgatgatgacgacacattaggtgtgtggtatcgccgttctgatttcgatggaagggcaagagaggacgcagccggatttgtgatagataaccggggatatttgtgcggtggatatcggggaaaagaccaacgggaaagagactgttgggaatataatattgataacgactggtggacgcaatgtgccgaccttcccgaagaggcggcggcccggaatggagctgtcggatttgcgatcaactccaaaggatatgtaactacgggatataccgtatacagagatgacgacccattacataccggaggatatgcatatttaaaagatacgtgggaatatgaaccggcaacggacacctggaaacagatggatgactaccccggagatgcgcggatcaacgccatagccttcgctatcggtaattacggttatgtaggcaccggtcagtctaaagatgataaacagactaaggacttttaccgctttgatccgacagccgcttccggcaaccaatggactattgtcaacggattcggcggtcagaaaaggactggcggactctcctttattatcgataatgtcgcctacattgtaggaggaacaaataatggtaaggatgtcgatgatttctggaagttcgatcccagcaaaagtgaagagaacaaatgggtacgtctccaggacattacagaccagagcagtgacgattacgatgacgattacaaatcaatcacccgcacctacggctgtgcttttgttatagacgatcaggcatatatcactttaggacaaacagcctccggtagcttccgaagtaactactggatatacgatcctgctaaagacttatggcgcagcagtgaaacggaagatgattttgactacactcctttcgaaggaagttcacgcatcaaagcggtttgtttcgctaccggcagacgaggtattatcactaccggaggcagcagcagctattattatgacgatacatgggagttacatccatatgaatgggaagagaatgactaagagaaagatactcggatgctctgttacaggaatattgatagtaatcgtttgtctgtctttttccaaaacatctttttctaaaacagattcttctgcctcttctttttcaatggaagtgattgaggtaaacggaggatatggctatcaaatatctcacaataatcatataacgatttttcagcctttcatacccagtgtttccggtaaaaaacctttcatggagaaaagggatgccgaacaagtcggacagttagtaatgaaacggatgaaaagcggagagagttatactgttactctagatgatttagaaagtctcgggatcaaaataaaataaatgtaaaaagaggaaaaggtgatcacatacgattgccttttcctctttttatatagtaaagaaggtgggatacagcattttctactctttttttatgcaaaatctatgcaagaatatggaattcctccaaggaatccatatctttgtaaccaaaacaatttaatattaatttcatcagaatgaaaaagagtatccttatcgctgccttaggcctgttcagcctaagcgcaatggcacaagacgcaaaacccgaagagggcttcgttttcacaacagtgaaagaaaatccgattacttctatcaaaaaccagaatcgttcgagtacttgctggagtttctctgctttgggattcctggaatcagaactactacgtttgggtaaaggcgaatacgacctttcggaaatgtttgttgtacacaaaacaatggaagaccgcggaacaaactatgtacgctatcatggcgacagttctttctctcccggcggaagtttctatgacatcatctattgtatgaagaattacggactggttccgcaagaagcaatgccgggtatcatgtatggtgatacactgccggtacacaatgaactggacgctgttgcagaaggatacatcaatgcaatcgccaaaggtaaacttactaaactgactccggtatggaagaaaggtcttagcgccatctacgatacttatttgggagcgtgcccggagaatttcacttacaaaggcaaggaatatactccgaagactttcgctgaatcactcggactgaaagctgaagattatgtatcactgacttcatatacacaccatcctttctattctcaattcgctatcgagattcaggacaactggcgtaatggtctgtcctacaatcttccgctcgacgagttcatggctgtaatggacaacgctgtaaagcaaggatatacattcgcatggggtagtgacgtcagcgaacaaggtttcacccgtgacggtgttgccgtaatgccggatgctgccaaaggagcagaacttaccggctcggatatggctcgctggacaggtctgactgctgccgacaaacgcaaagaactgacttccaaaccgcttccggaaatggaaatcactcaggaaatgcgccagactgctttcgacaactgggaaactacagatgaccacggaatggtaatctacggtatcgccaaagaccagaacggaaaagaatacttcatggtaaagaactcttggggtacaagtggtaagtacaaaggtatctggtatgcatccaaagcattcgttgcttacaaaacaatgaatatcctggtacacaaagatgcacttcctaaagaaattgcaaagaaattaggtatcaaataaagattcactcttatttaaacataaaagctccggaagttaagatgatttccggagcttttatgttaatgatgttctcttgtatactgtaaacagccaaatacttaagagaaactcagcttgctgatatgctccgcaaatctctccttgtaattatcaccaacaggaatatatgtatttttatcaaagatgatacgaagccgggaaacttcggttatcctacgcagattgacaatgtaagaacgatgtacccgcataaaatacgttggaagccgttcctccattttttgaagactggcaagggttatgaccggtttatcttctccttctataaagatacgcacgtattcgctcatcccttcaatataccggatgtttttcacatcaatgcgcaccactttgtagtcactctttacaaacaaggaatctcctttgatctgcgaactatttcccagttctccctgctgttccaacattcggtattcgtactgttttcgtgccttatccgctgctttcagcaaatcctgaaattcaaacggcttcaataaataatcgacagcatccagtttgaaaccgtctaccgcatattcagaataagctgtagtaaagaccaccatcggacggctgattaaagagcggataaaatccagtccattcaaatcgggcatattgatatccacaaatatcaggtcaatctcttcgtctgccaataccttcatcgcctcaaaagcatcctgacaggacttgactaaagatagaaaagggacacaggatatataatccgtcaattgcttcaatgctaaaggctcgtcatcaatcgctatacatttcattataataaaggtataataagtaagacatcaaatttatcatcttcctcagtaatggagagggtgtaatcattaccaaacaacaaccgcaaccgtttgcgtatattctccagaccgatgccgtgatgttgctcgttagacgaggtccccgtactattggtacatctgaaagcaagacggtttccttcttccagttgcattacaacatggacaaatgactctttcctgtagctcactccatgtttaaaggcattctccacaaaagaaataaaaagtaaaggaggaatttgaacttcgggcacttcgagagggaaattcttttcaatagaaactttctcaggatagcgcaagctcatcaaagtgacataattctccagaaactgaacctcgcgcaatagcagaatggttttattactggcctcgtaaagcacatagcgcataagtttagaaagttctacaatcgtactcttagcctttcccgtatcaatatccactagtgcatggatattattcaatgtattcataaagaaatgcggatttatctgatacttcagatattgcaattcagactgtaaacgctgatgctccagttctttcagcatttcctcatcacgaaaggatttaaaaaacagtttgacggcaatattaaagcctaccatcaaaaaggcaattacacaatgaataaggtaacggatggtgaagggaggaatgggataaagagtcggtttagagaagccgcccggtcgttgcggtttttccaaaaccggatcgtttgcctgaggcgcttcccaatgaacagactcttcctgccgagccttctctctcatcttaataatcaggtctctctgactttttcctttacccttgcgaagatctctatatctgaattcctttggaaaacgctccatagagggatcaggaataacccaacaagcagtagagattagaaaaaccaaagaaataatataataccagtactttttcttaaacaggaaatacggaactaatccataattattcaacagaaacaatacgaaaaaaggaagaatgctcaaccacgaatcataaacaattacacggatttcttctttttcaagtccaccactgacggcaaagtatcctcctatcaatgggagaagaaaaataacaatccaaatagccccataaatgctctgctccagcaattgttgtttacgcagtctttccatgcttcattgttccaaattactgatacaaagatagaatcgctgcttcatctccacaaatataatcgaccaaaggacttatttcaacggtaaactgctgttttaccatcctccggagcatccccattcatcatcggtctgactaccgtcatccattagcattcccgatattcctgtggagtcatttccacatgtttacgaaaatatttattaaaaaaggaaagattattaaatcctaatgaaaaagcaatttcctttacaggcaatcgggttgacttcaattgtgccttggcattcatgataataattcccgtgataatcgccaaagggctatgcccgctggctttacggatagcaccggaaaagtgagccggagtcactccgcacttcttcgcataaaaagaaacttcgtgttcctgcgtatagtgagtcatcagcaactggataaactggcgataaagttcatgttcccgcttgataggttcgttggtagtcggcttacagcgtttatacaactcacccaccccctgaaagaatatagtaaaaatagacattaatatttctttgttatccagtgtgttcggtaaagaataggcacggataagcaggctgaaagcgtttcggtataattgcgctacctcttcctgtaatgccataatagggttgtccaaaatcatagggagaaaatccagataggtctctacataactcacacgggagataaattccgaagaaaagcccgcaaagcagacacgggtatccgaagatacttcgtgaatctgtatgaatgatccggggaggacagtcacaaagtcattatgggtaatggtatactcggacaggttgatagtggcacgtacagttccccgcgtgcaaagaacaaagactcccgcctttatatggcagggaaaacgaccgtattgattcagaatatcgccggttatgctgtcatctgtaacaaaatcgaccggaaggtcaaacttgggaagagcatcatctatgatcataattaagaaatttagttccacaaagatatctttttccattcgaatttcctccaagtcctttattaaaatatgaaaaacagaacatctattatttaaaagagaacattacagttatctattcaaatacacgtgcatataaaatagttaaaatagaacatcgaataccaagaatagagcttgatgtagaaacaatattaaccgacatttgcaatgttttaataaatacgttgaaataaaaacaaaaaagagaatgaaaacattacgaaaactattttatgtagcttgtacaacattcttccttgcatcttgcgaagaaacctacaatgacaagctgttctggccgggagaactcagtcaggaatatggctcgtatatcaaaccatccactctggacctgacctacagcggagaaaagttaatcggaaaaactgtcaactttcagacggaagacagtaaaaaaggaacattgacattaaacgatatcattccgggagaaaaagagacatcattccggataaacttatcagagcaggaagacaactatacgttcagcggagaaacagtttcgtgcgcgggagcaaccgtgaaatacgccggctccattactccgaaaacgatgaaactggatttgaatgtaacgatgccgcaaaatcaatggataaaaacttatcagatgagcgaactgacacgcggcagaggaaaagatgtcgtacgcaatcagacaaccggcgaatatgaatggggagagtcggacaatcagatactgacagcagccctctataccgacatggatttagagatggtaaaggatgcgggaagtttgtacgcaaccgtatccgttattataaaaggcatgggaggatacctcttaccgcaattactcaaaagtgtcactttggaatccgacggaaacattacggccgaatatacatcggacgaactgcaattgggggaacagaagttcagcgaaatcgacatggataatcccgcatcccagcaacaactcattaatttcatcatgatgaagttaatgttcaatacattgtctgccgatgacattactgacgcaactcagggacgcaattatgcaaagtctccccggggactggctttctggtatctgaaaaatgaccttctctatgtcaaactaaaccttccgggtattatcagcctgaccatgcaagggcagggacagacggtcgatgctcatctgatagcaggcattgcagatgctatcctgaaatctaatcctttcttactgaagactctactgggaattgtgagcgaatcattggataactctttattatctatgatcgccaatatggatcaccaaagttttcagatgttcttctcgtggataaaggaaggcatccccatgcagatagaaaaggagaacggacatacgcatatctatctgaacagggaagcactgagccctctcatagccttcatccccaatcttcagccagcgatggaaggtattcctaacttcggtccgatgttgtacaattcctatataggtccactgtatgataactggtctatcatcacccaactggacttgggactcgacctgacagacaaaaacgaatgagactttccaccagaaaaaaacataaattacagaaacaatgaagaaactatatattctgacattattcatctgccttgccggattcgggactagttttgcccaaacgttgaaagggcatatatatgacgccaataccaatgaacctttggttggcgcagcggtaacgtacaaattacacggcaatcaaggaaccgtgtccgacataaacggagcgtatgaaatcaaacttccggagggaggtgtcgaccttgtgttcagctatatcggttatgaagacgttctgatgcccattgttatcggcaaacgtgaagtaatcactaaagacgtgtacatgaaagaaagtaccaagctgctggaagaggtagtggtaagcgccggacgctttgagcaaaaactcagtaatgtcaccgtatccatggacttggtgaaagcgggcgatatcgcccgtcaggccccgacggatatcacttctactctccgcacgctgcccggtgtggatatagtggacaaacagccttccatgcgtggcggcagcggatggacttacggagtaggtgcccgcagccagattctggtagacggaatgagcacactgaatcccaagaccggagaaatcaactggaataccgtacctctagaaaacatcgaacagatagaagtcatcaagggagcctcatccgttttgtacggttcgtctgctctcaacggtattatcaatatccgtaccgcccgtccggggttgacaccaaaaacccgcttcagtgcctatatcggcatatacggtgatgccgagaatgacgaataccaatggagtgacaagagtttctggaaggacgacaaatattccgtcaaacccatcctgcgcggaaaccttctcagtggtatacgaaatcctatttatgagggctttgatctctcccactcccgccgtatcggtaacttcgatgtcagcggcagcataaacctctttaccgatgaaggataccggcagcaaggatataacaaacgtttccgcatgggcggcaacctgacttatcatcaaccggacatgggtatgaagatattgaactatggtctgaatgttgattttctttccaatcagtacggagacttcttcatctggagatcaccgacagaagtttacaaaccgtctcctttcaccaacatgggacgcgaagagaacaacttccacatcgacccgttcatcaactatgtgaatccggaaaacggaacgtcacacaagatcaaaggacgtttctaccatagtgccgacaacatagtcaagcccagtcagggagcatccatcactgatatccttgggaatatgggaacgaacgcccagactatacagaatatagcaggcggcgattacagttcgctctacccggcattggtcggcatcggctccggtctgatcaacaataatctggaagatgccatgaacggggtattcacttccttgggcaacatcttccccaacgccaccaccgccgattattgtgacctcatctcatgggtgatggacaacggactgccaagtgacctgatgagcagcatacaaaacggacaagttcccagtgatctcattccctggctgtccaacgtaatgaatccaacccgaaacaacgtccagacgaaaacggacaagaactacaattattatctcgactaccagttcaacaagaaatgggacggcggcgcacagatcactaccggaatgacttatgaacatgtccgctacaattcctccatcatggatcaagtttacaaaagcgataatgtagccgcctttttccagtacgaccaacgcttctgggaccgcctgagcgtatcggcaggtgtacgtgccgaatattatcgtgtgaacaatcatcaccgtgaagccgaaacgaaaatattcggggccaaagtcccgttccgtccggtgttccgtgccggactgaactatcagttagccgattacagctttatccgcgccagtgccggacaaggttaccgcaacccgtccatcaacgagaaatatcttcgcaaggatatcggaggagtgggtatctatccgaacctcggcatcaagccggaaaaaggttacaatgctgaattgggattcaagcaaggatataagataggcaactttcaagggtttgtagacgtagcgggattctataccgaatacagagacatggttgaatttcagttcggcctgttcaataatgcagactacagcatgatcaacagcatcagcgatgctatccagatgctgacagacggcaaaggctttggcatcggagcacagttccacaacgtatcaaaagcgcaaatctacggtatggaaatttcgacaaacggtgtttatgacttcaacaagaacacgaaactgttctataatctgggatacgtatataccgagccccgcgatgccgactacaaagaacgtaatgaaatagaagatttatacactgatgctcttcagatgaaagaaaaatcgaatacaggcaagtatctgaaataccgtccgaagcacagctttaaagcaacggtcgattttcaatggaaacgcatcaacttgggcgccaattttgcatggaagagcaagatactggcagtggactatctcatgatggatgaacgtgaaaagcaacaacaagacctaatggactatgtacgcacggttctcttcggaaaatcgagaggagaaacgctggctacatactggaaaaaacataatacagactatgccaccgttgacttgcgcttcggggtaaaagcgaccaaagaagtcgccttccaattcatggtcaacaacctgttgaataaagaatacagttaccgcccgatggcagtagccgctccccgtacttttgtagtgaaaatggacatcacattctgaaaaactcacttagattactggttaaatctgtcggggagacttccccgacagatttttttatatacatccacacagaataaagcctcagctcccggatggccggcaacagaaccaataaaacgaacaagcagcaacgtatattaacacaaagagaaaaatattcaccgccaacctaccgcttctttgtgatttttgcttatttttggcaactagtataacacatacaacaaaacaccacttttaatgaagaggaatatctatatattatttactataggtctgtttatccggattctcccctcacattcagtaaacctgaataccgaacgactgtccaatttgaaacgcctgatagaaaacaacattgcgtacgattccatcgcgccgatagacagcgttatcgcctggggacagcaactgagtcctatactggaaaaggaaaacaagatggaactgtctttcagcatccggcaactggtggtttacatctactccctgcgcggagacatcgggaaagcaatcgacgaagcgcggcaaatgtacgaaaaagcagaaacgatgagatatgatttaggaatagccctttcgagcgcagctatcggagatgcctatttctgctccaatatgcccgaagaagccatcgattcttataaggaagccatccgttatcccgcctcgccttcagagaacaaccattataaagaaatgactatcctgaaacttatacaggtgcttattctgactcaaaggacagaggaagcagagaaatacagaaagatactttccgaatcaaaatccatacagacccatcagacactgcaatttctgacacttgctacagatgtttcttactatatccagaagaacgatctgcgcaatgcgaacaactgcctgctgcaagcagagcaaatctacctttcggacaggcaaccttattatcgcaccacctacaattatatgcaaggacgatataacgaagcaacagggaactacaatcttgcattacaatattacaatgagattctgaccggcatccggcaaaagacgcgctccatcatctacctgcaagtagcttatgccaaagcgaatttactgatagaaatgggcagtaaagtagaagcggcgcatctgtatgaagaaatcagtatcgtcaccgattcggtagtcgctcccagctatgcacaccgcatcaacagccttcgggcatcttatgaggaaaaccggatgaaagtagagaataaagccgagttcaaccgtattttcatgggcggcattttaataggagtcatagtgctgggcatcatgatttacctcgtgatacacatattaaaacaaaacaagaagatagcggaatccaaaatccgcatggagcaatcacgactcaacgccgagaatgctatgcagaccaaaagtcttttcctctccaacatgagccatgagatacggactccgctgagtgccctctccggcttctccagtctgctgaccgagcaggcactcgacgccgaaacacgccgccaatgcggcgacatcatccagcaaaactccgacttgttgctaaaactaataaatgacgtaatcgacctttccaatctggagatcggaaacatgaagttcaacttcacctattgtgacgctatcgccatctgcaataacgtaatcgataccgtcaacaaagtaaagcagacacaagccgagctccgtttcaacacatcgctggcttccctaaagttatacactgacgattcacgcctgcaacagttactgatcaacctattgatcaacgccacgaagttcaccccgcagggaagtatcacgctggaagtccgtcaggaatcggaagaatttgcgctcttctccgtcaccgacaccggttgcggaatcccactggaaaagcaaagttccattttcaaccgctttgaaaaactgaacgaaggagcacagggaaccggactcggcctctctatctgccaactgatcattgaacggatcggcggcagcatatggatagaccctgcctacaccaccggatgcagattttatttcacccatcccatcaaccccacaaaagaaggaaaggaggcacagtcatgaaacggttatggatattcttcatactgatcgtactggcaggaggaaccggcaaggctctctccagcaataacgaagctgccaaagacagtctgcttcagatactggacactttgccggccgattcttcccggctggagatgctttattcactcgcttatctggacccgatgtcaccttcctgcgtctactatctgggaaaattattggaggaagctaccacacaggacaacaagtattatcagtgtcttgctctgtatgcccatgtcgtttattacttcaaccaccaagacgaagaaaacacagtcatctggatggacaagctctctccggttgctttaaaaaacaactcctacagcttatacttcgaaggaaaaagagcagaaataaccatacatatcataaagcataaaatagaatatagcatcacccaagccgaagagatgtttaaactggcacaaaagttaaacaatccccaaggaatgtcatcggccaaactatgcctgatgactgcttatatgatgaccgcccgctttaaagaaggcgaagaggccggattcgaagcctaccgccttctgccacccgccgcctccctggaatcgcgcaaaagcgtgctccaagaaatagccttatcttgttccgccactagaaacaaaaacttcctgaagtacctgcaggaatacaagaaagtgctggacacactatcagaagcaaagcagacacccaaagcatacagctacctgttattggagtctctctatgccgactattatctgaatgaaggcacactggacgaagcccgcccccatctgaaaaagatggatgaatacttctctcctaccacttacattccttgccggggattatattataatgtgtattcccattattaccggattaccaaagaatacgaaaaggccctgtcatactctcaaaatgctatcgaactcctgtccgaagtatcggacaatgaagggctgaactacaaaatagaacatgcaagcattcttacagaggcgggacaagcggatgaagcaatcccgttattccaaagtttgctggcgaaaaaagactcattctatcgggcactatccatctcacagacgaatgaaatctatcagatgcgcaacatggacaacctgcttcttgaaaaagaacagtacaaagcaatggttcattatgccggactgactctgatagccatcgcactgcttatcctgattccgtctaccatacgtatctattatgtacgcaagaaattgaggaaagaagaagaggaaatccgcaagatgagccagattgcggaagaagcgaacgaagtaaaaagccgcttccttgttaacatgagctataacatacgcatcccgttgaataacgtcttagggttttctcaactcatgactacagatccggaaagcatggatgccgaccaatggaaagaatattcggagattatccagaccaactccgccgaactgatacaactggtgaacgacgtgctcgacctctccagactggaggccggcagaacgaaatggcagatacaggagcacgaaatcatctccttatgctcggacgttctcggtatggtacgcatgagatgcggagataagatacaggcagactttcatacggaaatagaaagccagccgtttcaggtagacaccgcccgattcacacaattgattctcagtacactgatctacacagacccgtgtgaagagaaaaggaaagtgtctctctatctggaacgtgacacgcaacgggaactatttgtctttcgggtagtcaacagtccgttagccgatccggccttgcaaacacaaaaagcagaagtacgccatagcatcaaccgtctgacaatcgaatatttcaaaggtacatatacgattgaaccgaatactccggaaggtcccgtactgactttcacatatccttattccaaaacaaataatatctaatcatatgaccaagaatctgatcacacgaaaaatacaattcttatttctcatcggagctatcctgctagcgccctctatcgcacgtgcttccgccgttacggcttccgtcgacagtctgcagaatctcttgcaaaacgacacggatgccaggcaacgggccattatctatattcatctggcggatatccacgtagacagcctcaacatttcctcccaatattgggacaaagccctcaccgaggccgcaaaagccaaagacgaatatatgatgaagctcgcactcgataatctgatacaacgatatgcttccaaaaacaaagagaaggtagaaaagtatataaccttcgcccgacaatatctgccggaagaatacaacacccttttccggtattacttgtattgttacaacatctgggcggaaatgcgaaagaacaattcgctggaaacaatcgaacaggaactggacaagctgaaaaaggaaaatcacggacaaatgacacctgaagaacaaattcaatgggaatatctgaccggagtatcactcgattattcagcggtactgacacattcatacaatgaagtttccaaagccattccttacgtagagcgcgcactggagatactagccccttatcctttgcaagacagggtgcacttcgaaatattgtgccactacgaactggcagacttgtatacaactgttgaaaacaagaaggcagtagacgaagtgaacaaaatgatcgagctacacaagcaatggaatcatctgaatacgactttcgaccgaagatttctggacgaatcacattactacatggctaaatattcgcagattattttcatggcagatcttatttcgaaagaagagataaaggactattatcagaaatatatccagatagcaaataaaaagaagattgtaaaaagcacttacgagacgacagcaagatattatcagacaataggcgaatacaaaaaggcgatagcctacattgattccgccactcaaacagaccatttccaaccagtcaacctcgttcccatactcaatgcgaaagccggtctgtactataaactgaatgattataaaaacgcatatctgactttaaaagaaagcaataagaaccggatgtcggataaatcacaaaaaagagagcaacaaatgatcgaaatgcaaacccgcttcgacgtcaacaaactggaactggaaaagagcaaactcgccaacaaaaacaaacaaatcgcactgaccggtacttttatcttattactggcagcaatcggatggagcatctatcagcgaacgatggtaaaacggctgaagaaaatgcactgcgcactaatgactgcgcacgaagaagtcagaaaacaaagcatgaaagccaccgaaagcgagaagatgaaaacggctttcctcaactctatctgtcatgaaatacgtactccgctcaattcaatcgccggattctccgaactgatcttcgatgaatctttagacacggccaccagacaagaattccggcagttgatacaaagcaattctaccgcgttagcttctttgatggacaatatgctggaactgtctcagcttgtcagctccgaactgcctcttcctgtggagtctaccgacgtatacggactatgtgttgaagaaatggccaaacttaaggaaactctgtccaagccgaacatcgaatgtatcatcacaggcgataaagatggaatgacggcacagacaaacgccttttatctctcccgtgtgattggcaatttactaagtaactccgccaagtttacagaaagcggaacaatcacgctgacctgcaacatcgacaaagaaaaaggacaactggtgatctccgtcaccgatacgggcatcggcatccctgccgacaagcaggaatgggtgttcgaacgtttcaccaaagtagatgacttcaaaccgggcaccggacttggcctgtacatctgccgcatcattatacaacggctcggagggcagatcagaatagataccggctatacttccggctgcaaaatggtggttactcttcccgtttaaccacctgtccgaatgctttttctgtttccgggtcctttcagattcgtcaacaattcgtatctttgccgcccgaatacaacaaagtcatcaaaatgaaaaaacgaattttacttattgcactcttattttgttccgttttagcacaggcacaggatgtttttgtaacagcggattttgtcagcagctacatttggagaggtatggacagcggtaacgccagcgtacaaccgtcattgggcgtcaactggaaaggactgaccgcctacgtctggggttcgaccgaatttcgccataagaataatgaaatagatttgtcattggaatacgaatacaggaatctgaccttatacgccaacaactacttcacgcaaacggaagaagaacctttcaagtacttcaattacagttcacactccaccggacatacttttgaagtcggtgccggatatatgattagtgaaaagttcccgctttcagtcagctggtacaccacatttgcggggaatgattaccgcgaaaacgggaaacgtgcgtggtccagttactgcgaactcagttatccgttcagtataaagaaggtggaccttgcccttgaagcaggctttaccccttgggacggcatgtattccgataaattcaacgttgtcaacatcggactttcggccaccaaagaactaaagattacctctactttctctttgccgatcttcggaaaagtgatcgccaatccttatgaagagcaagtatactttgtagtcggccttaccttataacccaagcatatatagctttcagtagtttccaccgcttgaaactacagtttcatcaccttgaaaccagagtttctgcagcttgaaactttagtttctgcggcttggaactaaagtttctgcagcttggaaccattagtttcaaggcgttggaaccattggtttcaaggctttggaactatagtttcatcgcatggaaaccaactagactaaggcattcctgaaatcgcctgtatatagaataaaaacaagagccgccatcccttgttactttacctgctttttatccgttgtccctcctatcacgttgtgacggcaacttcttccgtcacactgctgtcaccacttgctgtcaccagatgaatcatttatagtcagacagttacccttcgaacggtgacggtgacagatgtttttataaaaaacaattcctatggtagtgtctcttttccccattcccatcccccttctcccccaaactgccataggactatggctaacctcataaacttgcccttatttgctcaaaaaacttaataatgtgcattttttactcggttttcttgtcagaaccaagtgtttgagtaaatttgcacgctgatagttaaccggatagtttggatagcaagattattactacttgactactggctgctaatgtgtagaaatactaatactaaaattaatagcatgagtttgaaaattgttgtattggcaaaacaagttcccgacacacgtaacgttgggaaagatgccatgaaagccgacggaactattaaccgtgcggcactccctgccatcttcaaccccgaagacctgaatgcccttgagcaagctcttcgtctgaaagatgctcacccaggctctaccgtaaccattctgacaatgggaccgggacgcgctgctgatattattcgtgaaggacttttccgtggtgccgataatggttatttgctaactgaccgcgcttttgccggtgcagatacgctggctacaagctacgctctggcaactgctatccgcaaaatcggtgagtgcgacattataatcggcggtcgtcaggctatcgacggtgatacggcacaggtaggtccgcaggtggcagaaaaacttggtttgacgcaaatcacatacgctgaagagattctggaagtaggtgacggcaaaatcaaagtgaaacgtcacatcgacggtggcgttgaaacggtagaaggcccgctgcccatcgttatcacagtcaacggttcggctgctccctgccgcccgcgtaacgccaagctggtacagaagtacaaacacgccaaaaccgttacggaaaaacaacaaggtaacctcgactataccgacctgtatgacaagcgcgattacctcaacctgcccgaatggagcgtagccgacgttaacggagacctcgcccaatgcggtctgtccggttcgcctacgaaagtaaaagccatccagaacatcgtgttccaggccaaagagagcaaaaccatcagcggcagcgaccgtgatgtggaagaactgattgttgaactgttagctaaccataccatcggataatcatgaataacttatttgtatattgcgaaatagaagaaggcatcgtcgcagacgtcagcctggaacttctgacaaaaggtcgttcgttggctaacgaactcaactgccaactcgaagcagtagttgccggcaccggcctcaaagaaattgaaaagcaaatccttccttatggagtagacaaactccacgttttcgacgctgaaggactctatccttatacttcacttcctcacacctccatcctcgtaaacctcttcaaagaagaacagccgcaaatctgtctgatgggcgctaccgttatcggtcgtgacctcggcccacgtgtttcttcggctttgaccagcggtttgactgccgactgtacatcccttgaaatcggtgaccacgaagataagaaagaaggaaaagtttataagaacctgttgtaccaaatccgtccggcattcggcggtaacatcgttgcaaccatcgtcaaccccgaacaccgcccacagatggcaaccgttcgcgaaggtgtaatgaagaaagaaatcgtttctccggcttatcagggagaagtgatccgccacgacgtgaagaagtacgtagccgacacagactatgtggtcaaagtaatcgaacgccacgtagaaaaagcgaagaacaacctgaaaggctctccgatcatcattgccggtggttacggagtaggttcgaaagaaaacttcgacctgctgttcagcctggcaaaggaacttcacgccgaagtaggtgcaagccgtgccgctgttgacgcaggttttgcagaacacgaccgccagattggtcagacaggtgtaacggttcgtccgaaactctacattgcttgtggtatctcaggacaaatccagcatatcgccggtatgcaggaaagtggtattatcatctctatcaacaacgatccggatgctccgatcaacacgattgcagactatgtaatcaacggaaccatcgaagaagttgtgccgaagatgattaagtattataaacagaatagcaagtaaagaaagatggctaatttttacacagaaataccggaactcaagtatcacttgaacaatccgatgatgaaacgtatttgcgaacttaaagaacgcaactacagagataaagatgaattcgactacgctcctctggattttgaggacgcactggactcttacgataaagtattggagatcaccggagaaataacaggcgaaattatcaatgcaaacgctgaaggtgttgacgaagaaggtccacactgcgccaacggacgggtggaatacgcttccggcactaaagaaaatctggatgcgatggtcaaagccggtctgaacggaatgacaatgccacgccgtttcggcggactgaacttcccgatcactccgtacaccatgtgtgccgagatcgttgctgccgctgatgcaggtttcggaaatatctggtctttgcaggactgtatcgaaacactgtatgaattcggtaatgccgaccagcacagccgcttcatcccccgtgtatgtcagggtgaaaccatgtctatggacctgaccgaaccggatgcaggttccgaccttcaggcagtgatgctgaaagctacttacagcgaaaaagacggttgttggctgctgaacggtgtgaaacgtttcatcaccaacggcgatgcagatatccatctagtacttgcccgttcggaagaaggaacgagagacggtcgcggtctgtccatgttcatctatgacaagcgtcagggtggtgtggatgtacgccgtatcgaacacaagctgggtatccacggttctcctacctgcgaattggtttacaagaatgccaaagccgaactttgcggtgaccgcaaactcggtctgatcaaatatgtaatggcattgatgaacggtgcccgtctgggtatcgccgcacaatctgtaggattgagccaggctgcttacaatgaaggactggcctatgccaaagaccgcaagcagttcggaaaagcaatcatcgacttccctgccgtgtatgacatgctcgccattatgaaaggtaagctggatgccggccgtgcgctgctttatcagacagcccgctacgtagacatctacaaagcactggacgacatctcacgcgaacgcaagctgactccggaagaacgtctggaacagaagaaatacgcaaagttagccgacagtttcactccgcttgccaaaggtatgaactccgaatatgcgaatcagaacgcttacgactgtatacagattcacggaggctcgggcttcatgatggaatatgcctgccagcgcatctaccgcgacgcacgtatcaccagcatctacgaaggtaccactcagttgcagactgtagccgctatccgctatgtaaccaacggttcttaccttgctacgatccgcgaattcgaaacagtaccttgttcaccggaaatggaaccgctgatgtcacgtctgaagaagatggcagacctgttcgaagccagcaccaacgccgttaaagaagcacaggatcaggaactgctcgacttcacagcccgcagactgatggaaatggctgccgatatcatcatgtgccacctgctgattcaggacgcaagcaaggctgccgacctgttctccaaatctgcacatgtatatctgaactttgctgaagcggaagttacgaagcataccaactttatcaaaaatatggataaagaagaccttgctttctacaaaaagtaaccctaaaagggtgactaacgataaaagcatcccttccaacgaagcggatgctttttttgtcctcttctttccaaaaggaacttactaaatctcaaagtattagtattctcgttgtccgcataaatatccccctcccatttaccctctatttcattattattctgtacttttgtacaaaaagagagtaatatcaatctacgacttaataaaagagagaaatatggcgtttagactcagacctttacacgaggataagctacattttgcagatttatcaaatacacaaattctgatactggcactcgaagcgtctcagaaacttgaatggaatatcgaaggaatcgctcttcgtgaagtcatattttatgttccaatgggtatgcgttcccaaggagaagaagtgactttcaccatcgaagaaggaaacagcggtgaaatatccgtccgcagtcaatgcgcctccgtacaactggtagattacggcaaaaatcgcaagaatatccaaaaactacaggaaacgatggaagagattaaatctgctctgacaccggaggaactggcacaaaaagccaacgaactggaagaagaactcacccgcccgctgacggaagaagaacggaggcttcaggcagaaagcgaaaaagagtcgtctttcatccatttctttatcccccggaaaggattcatcgcgacaccggttctgatagacatcaatatccttgtcttcatactgatggcagctaccggagcgggaattctggaaccttccacactggccttgctgaactggggcgccgacttcggtccgctcaccctgaccggtgactggtggcgtgccgtgacctgcaactttgtgcatatcggcgctttccatctgctgatgaatatgtacgcctttatatatataggtatctggctggaacatctgataggtacgcgtcgtatgttcgtctcttatctgctgacaggactctgttcggctgtcttcagcctctatatgcatgcggaaacgatcagtaccggagcttccggatcgatcttcggactctacggtatctttctggctttcctgctgttccaccgcatcgagaggtcgcagcggaaggctttgctgaccagtattcttatcttcgtaggctacaatctcatctacggcatacgggccggagtagacaatgccgcacacatcggcggtttactcagcggattccttttgggattcatctatgtattcggcgaacggatgaagaagcccgaagccggaagaacggtttccatcatcggagaactgatcatcttcagtgtcttcctgttcagcttccttgcactctgccgcaatatcccctcgacgtatcaggaaatacgtaacgaatggaaaagcggacttgtagaagcctattataaggaacaggaagaagaacagaaaaaaagcgccagccgcccggtgaccggcagtccccggaaatcttccacttccgaacagttcccgtatactcccatgtcggatgaggatacgtggctttcatgctatgacgctgtatcaaagttcagttgccagtatcctaccaactggtacaagataaccggcacgaaagcgccgactcccgattcggagcctcccctgctgaaactcgtcaatggcggcagtcagctgaccgtgaccagcaacagctatgatacgcaggatgagttcgaacgtatgaagaagctgctcctcaccctcccccgaaatgaggaaggaaagccctcggaggattacaagcagagcaaagtcaacatcaacggcctgcctatgacgaagacgaccaatcctttgcggatcggccaccccgacgaaaaaggagaagaaatgcaacaaaccgtattattgtactttcaggagaataagagaagagtctttgccatcgtcatgctggttgcggacgaaaaggctcaggctgatctggacgcaatcacgtccagtattcaaatcgaaaaataaaagtaagtatgaaagcatatatccaagtcaagcaagtaggaaaaaggaaatgcagcatcgaaaagatgccgatcgatttccccactcctcctgccagtgtgcaggaactgattgaagcggtcgtctgctggcaagtaaaggagtacaacgaacggctgcaacaaagtgaaatgctgaaatacctcacctgtgaagagatggaggacaaggccgccgccggcaaagtaggcttcgaagcaaactataacggcagaccggctgtggaaaccgaagccatcatcaatgctttgcaatcgtatgaagacggaatcttccgcatctttctggacgatgcggaactcggagaattatcctcctccgtccaactgaaagaagaatctacacttacctttatccggctggcaatgctgtcaggaagactttggtaactgcaatataaactctaaaagcttaaagtcatgagaattacttacaacgacaaattgaacaagctgctaaacccctatttggagagtttactaaaggaaaaatcaagcctggagccggaaacgcttaccctgttcgacctattcatggaggatttggacatgggaggacggtatggtatattcagtgagatactggaacctcgtctggaggagatcatccgggaagaaaacatcgaaagcattgccaatctgatggatggcagacttaacacgctgttccgctatatgttgggcgacgaattcgccggactgttccatacttatctgcaactcgaagcacgctgtccgcataccatcggatacgaccggcgcgcccagcgttccgcccatccgtccaatcatctggaccatgccagagacgcatggctacagtttttaaagttacgcgctaccggattttcagtggaagcgatcttaaaaggaggaaatacacccgaagatacagaagaattcagcggctatatgaactcttcctactggctggccgcacaaatagcgcaaggtaacgaaaaagtaatcgaatacctgaatcaggtactgaccagcgaaaacaatgtccaccgcctgcaacgctggtatctccacgccatcgccatcagcggacaccgcccgctgttggaactggaaggcaaactgctgctggcagccaagctacaagaaggactgcgccaagccatcgtggaaacgatggacgaaggatgtcccgaaagttacctctacctgttctccatcatctacaacaacggactgcaacgttttgcctccgtcaagcgaagcatcgccgtatgcaccggaatcggcgaacaggacagcagcgaacggattaccaacaagtatgtcgaactgatctggaatttcctgaatcatcccgaaacagcccgcaataccctgcaaagcaaggatacagtcgaactttatctggctttgtggagcatcggattctatgatacggacgagatcagagccatcgtaccggacatcatccgaaagggagccaagcatcagatacagacgttactgtacttcctgcgctgcacgcaatcgtctcagatgaatcatctgatcagcaaagacgcattcgaagtgtggcacgacgatccgaaagtggtggcggctatccttcctctttatatggacgggctttatctaagccgatacagcgataacaaggaagctcccacactcagcgattattttgaaacgccggaagaggcggtccgtcactacggatatctgaaacaagtctaccagtctatttccgccaaggaagtctattcgccttatgtattcccgtgggattgtgtggtgctcacccgttcggatgtagtcctcaaaatggcgtacatcgcatggatgaccaacgatatccggctgagagaggaactttgcacgtatcttcccgcgctcgaatcttacaaccgcgccagctatatcggaatcgtcctgccccgtaccgaaagcaaggtggagcaggaatatgtactgcaatcactcggcgaccgttcggcagacatacgggatgaagcatacaaagtattgtccgaaatgtccctgtcccccgaacagtatcagcatatagaagaattgctccgtttcaaatatagcgagatgcgtatcaatgccatcaatctgctgatgaaacagccggaagcacaactggcggccagtatccgccgattgctgagcgacaagaatgccgagcgccgccttgccggactggatatgatgaagagcatccgcaacgtcgatttcctgaaagacagttatcagaaactcctgtccaccgtcagagagattcagaagccgaacgccaaagaaaagattctgatcgaatcgctgatcggagacggtacggaacaaagcccgacaagtaactatacccgagagaatggcttcgggctatacgatccggcgcttgaagtcagcctgcctccgattactcccgatgccggattcaatgtgaagaaagcatttgagtttattcgtttaggaaaagccaaagcgatcttcgacaagctgaacaaatacatcgaaaagcataaagaagacgaattcacggataaatatggtgaagtacgcctggtgggcaacagtgtcttactgaactggtacaagcactacgacggactgagcgaactcggacttccggaactctggctgaatttctatcaacaggaaatcggcagttacgacaaattgctgatgatgaagttcatgctggcctctaccggagcacccaacgaaatagaagaggacgaagacgatgaatttgacgaagaagaacaggaagacaaggaagccgctatccaatcgctcaacacattcgaaccgcttatcaataagatgtatgcaggcttcacttaccgcgggctgcaaaagtcactccgcaagctgacctattacaggcagatagaagatattatcgacggactggcacatgaatacagaaacgaagcaacttatcagcagttctccgtcaatatgcttttgcagttgcttcctctgctcaatacaaagaatatcttccgtcaatacaccaataagcatacatggctcagagacaagcaggaatatggagcaagggagatcgtttacccgatacacaacaacaagtttgtacggttttggctcgacgcgcctcagcatcccatcaatgacgctctcttcacccgttatttcaccgtccggtaccagctctacaagctcaccaactatatggagcatactcccgaactggaagaaacggatgtctacctgcaaagcatggactttgcccacgcatggatgctgggactgattcccaccgaagaaatataccgggaactgatgggacgtgtcaactcgcccacacgcatcaaagatatcacttcggcactggacgagcgcaaccactccctcttccattcactgacccagaaagtagtgaaccggattctggaaatagagttacagcggggagattccgagactcaggtcacccgtctggcggaagagcttcaccgcgtctacggagcagaaacactgatccgtatcctgcaagcgttcggcaaagataccttcatacgtgacagctacaactggcgcaataccaaacggggagtattgagcagcctgctccatgcctgctacccgtctccggacgacgacagcgatacactcaaaagcctcgccagtcaggccgacatcagccatatacgactggtggaagctgccatgttcgccccacaatggctggaactcaccgaaaaagcgaccggatggaaaggactggaaagcgccgcttactacttccatgcccataccagcgaatgtttcgacgacaagaagaaagcgatcatcgcccgatataccccgattgccatagaagaccttcaggaaggtgcttttgacatcgactggttcaaggaagcctacaagactatcggcaaggaacgtttcgaagtagtgtacaatgcagccaaatatatttcattaagcaacacgcatacccgcgcccgtaaatttgccgatgccgtcaacggcaagaccaaagcggcagacgcgaagaaagaaatcatagcgaagcgaaataaagacttactgatgagctacggccttatcccgctgggacgaaaagccgacaaggaattgctcgaacgctatcagttcctgcaaaagttcctgaaagaaagcaaggaatttggtgcacagagacaggaaagtgagaagaaagccgttaccatcgccctgcaaaacctggcacgtaactccggttacggagacgtcacccgtctgacatggagcatggaaacggaactgatcaaagaaatcactccttacctgacccccaaagaaatagaaggcgtggaagtctatgtgcaagtcaacaatgagggcaaaccggaaatcaaacaagtaagagccggaaaagagctgaacagcctgcctcccaaactgaaaaagcatccatacgtggaagaactgaaagcggtacacaaaaaactgaaggaacagcacgcccgttcccgcatcatgctcgaacaggcaatggaagactgtacccgttttgaggaaaacgaactgcgcaaactgatgaagaatccggttatctggccgctacttagaaatctggtcttcaccagcaacggcagaacaggcttctacaccgacggcctattgataacggctgacggcatctgtcttccgctcactccgaaagaggaactgcgcatcgcccatcccacagacctgtatgcgagtggcaactggcatgcttatcagaagttcttgtttgacaaagctatccgccagcctttcaagcaggtattccgcgaattgtacatcccgacaacggaagaggaaagcgctacgcaatcccgccgttatgccggaaatcagattcaaccgcagaaaacggttgccgtactgaaaggacggcgctgggtagccgattacgaggacggacttcagaaaatatactataaagagaatattattgccacgatctatgcgatggcggactggttctctcctgccgacatcgaagctcccacgctggaatttgtctgcttccataaccgcaaggattataaaccgatgaagatttcggagattccacctgttgtcttctccgaagtgatgagggatgtagacctcgccgtcagtgtggctcacgccggaagtgtcgatccggaaaccagccattccaccatcgagatgcgccgtgcattggtagaacttaccctacccctgtttcacttcagcaacgtcagggtgaaagggaactttgcatacatcgaaggcaagctgggcaaatacaacattcatttgggcagtggtgttatccataaagcaggcggtgcacaaatagccgttcttccggtacactcgcaaagtcgcggacgactgttcctgccttttgtggatgaagacccgaaaacagcggagatactgacgaaaatcattttcttcgcagaggatgataaaataaaagacccgagtattctaaaccaaatcaaatagaaaagagatggcagaaaatttactgattcacacaggtaataaagaagagaaatatcgtgaactgcttccacagctacaagcattggtaagctcggaaacgaatcgtatcgccaatctggcaaatattgccgccgcactgaagcagactttccactttttctgggtcggcttttatatggtggaaggcaacgaactcgtattggcaccgtttcaaggtcccatcgcctgtacacgcattcgtttcggcagaggagtttgcggcacggcatggaaggaagcgcagacgctgattgttcctgatgtagagctgtttcccggtcacatagcctgcagttccgattccaggtcagagatagtagtacctattataaaagaaggaaacgtcatcggagtgctggatatagacagtgatacaccggacagctttgatgaaacggatgcacgctatctggaagaaatctgcacgtacatcagatagttttctttgtactgtaacggtccgaataaaacagaggctctgatctacgtgaacagagcctctgtttgctataaatagagccttcgtttgcaccaaacagaggcttcgtttttctaccagtccgcttcctctatttccctttcccgaaacaacagaagttgcttgcggagggaagtaatttcacgcctcatatcgtccattctttccagcatatgatgaatggcgtcaatgccttccatattgatggataagtcatagtacatccggctataacgttccacgttcggaagttcagaaacaagcagataatgcttgccggcttcggtacgtacattaatcaaaccaccttcttccaacatctcaatgaatgaaggttcaatatgacacttttgacagtattcactgacaataattaattcggtctgcatagtgctcattcattttagttcatactctgtaattgacggaacaactccttctgcgcttctgtcagattcgtcggaatcttgacggaataggtaacaatcaagtcaccgaattgtccttctttcttatagaccgggaatcccttgcctttcagacgcactttcgttccattctgagtctccggtttgatctttagtttcactttaccgtccagcgtatcaacgactttatcaccacccaatacagcagtataaaggtctacttccacgtctacgtacaagtcatcgcccaaacgcttgaatacagggtcttcggcaatgacgaaagtgatatacaagtccccggccggacctccgttcacaccttcagctccgtaacctttcagtttaatcacctgcccgtcggccacacctgcgggaatggtaatacgtacttgtttaccattgacagtcaatatctgtttatgcgtctgagcagcatcacgaagtgaaagatgaagctccgcattaaagtcctgtccacggaatccggcagaactttgtcccctgccccgatgcccgaacatcgattcgaagaaatcggagaaaccaccggcattacctccggagaatccaccgccaccgtcggacgaataccaatacgttccgtcaccatcagagaatccctgaccgccaccaccgaatccgccaaaacctccggcacctccaaagccaccggcttgctgccgcgcttttttctgagcttcaaactcatcggcatgcttccaatgctccccatactcgtcatacttcttacgcttctcagggtcactcagtacttcattggcttcattgatttcctgaaacttgtccttcgcacttgggtcattagggttcaggtcaggatgatacttccgggccaacttacgaaaagccttctttatatcatcctgagaagcacttttgtcaactccaagaatcttataataatctatataagccatgttttatgaatttaatcgttcatacttttatatcgcaaataacacgccaatcatgcttttggatataagaattaacaaggattaatgaataagtaataggtaataagtattaggtattaagtattacaccgtagccgtacaggcaaagctttacgaagctacgattaatacttaatacttattacttaatacctaatacctaatacttgacatttctggaagtcaggctgtttcattcccagatcatccaaggggcggggttcgttatggtcattcagatatactctcggcttcatggtgtaaagagggctgactacagatgaggaatcgttgcggtaagaagtttgcactcctcccagttccagcatggtaggaaagaatgaacggctggaagataggtccttatccttattcttggtcacggtttgccaatgttcgggataagcttcccgataggtgtcggacatccatatcagaaacggaacatgaagctgatagtaagaaggaactggagaagcatgaaggaacagatgacgggaatcgtcaaaaatatcctctccatgatcagaggtgtagagcattgcagcatccacgtgctgttcttcgagcatctgaatcagacgtgacagaaagctatctgtatagcggatggtgttatcgtaagcattcaccaggttatcacggtacttcacttccgcttctaccggataatcgggcagaaagaaagcgtcttccgacggataacgttcacgataattgaaatgtgagccgtatgtatgaagtacgataaactgtttctgatttcccttggataattctttcgctactaatgccagcagttcatcatcagaaggattgtaggcggaatccagcgaatcttcttttataaaatcgaatgtatcggcttcctttccgaagaaatcaataaaggaatgattatagcgctggttggagaaaaaggctgtctgataacctgcctccttaaaggccgtgatgattcctttttgatagtagatggagtcgaagttacaggctgtaatatccgacatcagcatgggcacgcttttatgggtggtattcgactctgtcaggactttggagaaagcaacaattcccggttgacgggacagaagcggattcgtctcccgttcatatccgtagagttgccagttcaatgcacgggaagtctctcctactaccattacatacacttcacgcttgtccgccggatgagtggcttgggcatggaaagtaaaatctttcgaagtatgatggtaattttgcgtcaatgccgtgcgttgaaaagcaagtcccacattatagcatacattgagaggataaagatcggatttcagttcatagcgggagtcttcccagtaagctccgcccagggcgagaagagagattccaagcaggatgaaggctctcttccgttctctgcgaataaatgtcacagaaagccggcgcttgcggataattgaaatcatacccaatatcagagcaggaatgtaaagtatgactacggtagctatggccggcaataagttgtccagcagctccatcgcttcactcgaattggtggttaccagattcagaaacatatctacagcgatgatggactgtccgaacagataaagcagcacaatctgaaaggcgccgaaaaacaggaagatgaacaaaatccatagcatcttgccacagttgcgggacaaagtcatcagcagatagtaacaggctaaaggcaacaagacattacttaccttcgccatcaacggcaagggttctgtgaaacacagaacgatgttgggcattatcaggatgatcagaaacaagtagaacaagtgttcctgattttcaaaccatttctttatgttcttaaaaagcttcattgatattaaatataaatccggtctggtgcttgccaaaccctaaatccaaacgtacatttactctcttcttaaattcccagcgatagccgaaaccataattgggaaggatatgcttcggcgtaaagtcggagaagcgtggaaatacagttcccgctcctgcccatacagccactccgtttcgtttccatatatgctgacggagttctatctgtgcatccatcgcacacttatcacgataacgcccttcataataaccacgcattgagtaagaacttccgagggttgccatcaatccccacggaggattgccatagttcagtaaagtgtgaaactgccctgcaaggactccgcctttccataccggatggtaatagctggttgtcagttccgtactgctaaacgcatatttattaccgagaaaagccggactaaaccgttggtctatccgcaaataatatccctgataggcattggtcagaaaatcacgggagtcataaagaagggaaaggccgagactcgtatttgtagtccgtgccgacattccttcccaaagttccggtttctcaaagtcgcgcccgtctatataatcgaatacagccattggtccgatatagaaacttttcgctacacgaaacatgaagtcgactttcacttgcgcctgaaagcgtttgtagtcgctttcattatcagagttcgccccattatcatatccccttccccaataaagactggggaaagaataaaaataaagattataattcaaccggtatttctcttgcgggaacaggtgattgcctcttactcccaacagataaaaaccaacagtagagacatctccataaagagaaacattcgaagggggaaggatcgaatcattgcggtctgtacgatacaaccccgccgccaccaatccaagaccaaacttggtatcactggaataatgaggaccgccaatcacactgaaatcgaactttttatttttcttttccttattggcgtcattaaaataatcaagaaacttcttgaagaaactgcgctttgtctgaagcgagtctgaggttgccacagagacagaatctatcggcacatctttgcccatagaatcagtctgcgcacttatagtggtttgtgtcaacaacaatagcgccaataatacaagtccgtttcgtctagcatccatcataacaagaagcaatattacggggacaaagttagccccaaacttcctattacaacagtattatagacgcttttgttgttccattcttcccttttaacgtctcaaaagtcgaataaattgatttacatcctcttccgttgtgtcaaaagaagtcaccaggcggatttcatgattcgcctcattccagaaatagaaaaaataagattccagcatccggtcgatagtcggacggggcatagtcagaaataactggttgctctccggcttctgggtaaaggtgacttcaggcagttccttaagtgcctgatagagcttagccgccatcgcattggcatgagcggcattcttcagccacaggtcatccgtcaggtaggcagtaaactgacaggaaaggtaacgcatcttggaagccaactgggcagattgcttccggacaaaacgggcttcccgttgcaggtccttattaaatataatcacacattcccccatcatcagtccattttttgttccgccgaaactaaggatgtcaatcccacagtctacagtcagttctttgagcgaaagatgaagggcggcacaggcattggcaatccttgctccgtccatgtgtacatacataccgttcagatgggcaaagtcagtcagacgtttcagttcttcgggtgtataaatcgttccgagttcggtgcattgggagatgtaaagcgcacggggttgcgaatgatgctggtcgccgaaaccgtgcagataaggctgcatcagttcgggagtcaacttaccgtcggttgtggcaatcggccgaatctgacaacctgtcattttcacgggagagccgcactcgtctacataaatatgggcagtttccgcacagaagattgaatgatacggacgcgtcattacttgcaaagccaccacattgctgcccgtaccattgaatacaaacaaagggacacagtccggtgtaaaggtttcttttatcttggctacggcttcttccgtccattgatcatcaccataacccaacgcatgatctgcgttggcccggctcaatgcttccatcaccaacggatgcacaccggaattattatcagaggcaaaacttctcattgtttcttcttgtttcttcgcattgttttaattgtcatgcaaagtaacagaattatttccagatatacttcttgcgcagccaataatctaatccgagcaagaccaatgcaagaagtgcgatatagacataaaatgcaaacaaaaaagaatcctgccggacattcatttgcggcatcacatcggcaaagttaaattccagatagaaagtcagcacatagacacccagccctaccaacgccaaagccgatatcagcaaagctgcccaaccgattctcgttttccgcttcgtctgcttctcagcctcctgatgaacacgctccatcatccgatacgaaaaattggaagacagtcgttccgtttgcctccgttccaatgcttgtttcagcatattgcccgtattctcgtttatctttctttcctcttccatatcctctcttctatttattattcatcaatacacaaatctttttccgggtacgatgaagccgtactttcacattactgagcgaaagtttcagcacctcaccgatctcttccattgacttttcttcataataaaacaaagtaatcaatgctttctcttctccgctcaactgatctatcgcctgactcaaacgatccagctgttcttcggtttctgccggagcaagcacattgtccgccatctcatcgggtacattattaatcgtattctcttctatataaagaaactcctgtttctttttccgggtagccgagatagcggcattgtaagcgatgcgataaatccatgtagaaaaacggcactcgcctttataacgattcaagttgcggaaagctttcagaaaaatatcctgaagcaactcctccgcatcttcgggacaaccaacgatctgcaccaccaacgtatacaacggacgactgtagcggtcaagaaatacggaaaagtattccgtctctccatccagtatgcgtttgatatagtatgattcgtctttctgttccatcttgactctttagacgctgcccgttacaaaaggttacagtccgggaaaggaaaaatacaggattataaattatccgcttttcagtgtaacctttttccgtccactgcgtcaaacgatacaaagaacgaaaatattcacttaaaaacagtataattatgatggattttatcaccattcccttggtcgtaggtactattacattaggaatctacaaattatttgaactttttgtatgcaggaaagagcggatagccatgattgaaaagctggctgacagagtcaacacaggagaaatcaacagtaacttatccctcaaccttaattactcccgctcccggtttaccttcggttctttaaaaagcggtctgctgatgcttggaataggattaggtctactggtcgccttctttatctgcatcaactcatttccgggatacactgcttccagaaactgggacgtggaacgtcaggcaagtgtcgtgtatggcgcatgtgtacttcttttcggtggcgcagggctgctggcagctttcctcatcgagatgaaaatacagaagaaagagaaagaataaaaaaccaaaatccccgaagcctcatctacaaagatgtaacttcggggatttaatttgtactcattaaaacatcagacattctttcatccaatataaacatttacacagagatatacataaagttcttcatcacactgatcgaactctatcttattctctctcgataaccagcccagagcggcacccaattctttatccttcaacccggactttctctttaaggtaccatagccccatttctcattgttgctcagcagttgccagactttaccagcatacacaccgatttgctttctatccattttctacagctattaagaggttataaacattaggttaagatttcgcctataaagataacaaatggatatcacaattgttccctccccgatactaaaaagttgttacaaaattatttttaacataaaacctgcgatgtgtaccgacacaacaagcatattagcatatgttaaaacagaacttttcttggcatacatctgttattacattaagaatcaatcctaaacctattagaaatatggcaaaaaaaatagcagaacaactgatcgaaacattagttgaatcgggcgtagagcgcatctatgccgtgacgggcgatagtttaaatgaagtaaacgaagctgtcagaaagagcaataagatacaatggatacatgtacggcatgaagaaaccggagcctatgccgcagcagccgaagctcaactgaccggacggataggatgctgcgcaggcagtagcggaccggggcatgttcacctcatcaatgggctatatgatgcacaacgatcaggagcaccggtcattgccatcgcttccaccatccccagcggagaattcgggactgaatattttcaggaaaccaatactataaaactctttaacgattgcagctactataatgaagtggcaaccactccgggacaattcccgcgtatgcttcaatcagccattcagacagccatcacccgaaaaggagtagccgttgtaggcttaccgggagacctggccaaagcatcttccgtttccgtcgattcttcggtaaagaattatccggctccgccagaagtctgtccggcagaagaagacttgatacaattggcagagttgctgaacaaccataaacgcattactcttttctgcggcatcggctgtcggggagcacacgaggaagtgatcgcgctttcggagaagctgaatgctcctgtggtatatactttcaaaggaaaaatggaagtacaatatgaaaatccttatgaagtcggaatgaccggactgttgggaatgccttccggctattacagcatgcacgaagccgaagtacttcttatgctcggcacagactttccttattccgctttcctgcccgatgacatcaagatagcacagatagatatcaaacccgaacggctcggacgccgtgccaaagtggatatcggactttgcggagatgtaagaatgactattcaggcattattgcgtatgctgaaccccaagactgatgatactttcctgctgaaacaactgaaaagatatgaaggggtaaagaaagacctggcagcctatacggaagataaaggagatataaacaaaatccatccggaatatgtgatgtccgagattgataaactggcatcggatgatgcaatattcaccgtagataccggaatgacttgtgtatggggtgcacgttatctgcaagctacgggaaagcggcatatgctgggatctttcaatcatggttctatggcaaatgctttaccacaggccatcggggcagcacttgcctaccccgaccgtcaggtagtggcactctgtggtgacggaggtctgtcgatgactttaggagatctggagaccgttgttcaatataagttaccgattaagatcattgtcttcaataaccgctccttgggaatggtaaaactggaaatggaagtagacgggctgccggactggcagacaaatatgctgaatccggactttgcgcaagtagccgaagcaatgggaatgacaggcttcaatgtcagcaatccggaagaagtactgactactttattaaatgcattcgaactggatggtccggtactggtaaatatcatgaccgatccgaacgctcttgccatgcctcctaaaatagagttggggcagatggtaggcttcgcccagtccatgtataaactgttgattaacggacgctcacaggaagtgatcgatactattaattcgaattataaacatatacgggaagtcttctgacagttccttcttcaacgatatttatccttgcacacagacaagatgattatcttcagaaaggtataacctgatctcattacagaccaacaatgagtcaggttctaccttttttatatatccaactgaaggataatcattttattttcttatgtttgtaatcatcaaaaaagagaagcacatggaaaaaccggactcttcactcctattcagacaaccgatgtatgccgataaaagacaatggaaacaatttctttctatttttctgttagccgcaggcgttggttttacggtggcaggaattatctttttcttcgcctataactgggaagatcttcccaaattcgccaaactgggaatcgtacaaacattacttgttgcatctgtcctgctgacagtattcacccgatggaatatacttatcaaacagataatcctcactggagccacattcctggtaggcacactttttgctgtattcggacaaatctatcagacgggcgctgatgcgtatgacctgtttctgggctggacactgttcaccatcctttgggcagtcgccatccgtttcactccgatctggctgatgtttatcggactgctctgtactaccatatggctgtatgctatgcaaatagtgcctgataaccaatgggcagtcactttactgaccagtgcagtaacctggatttgcgcttcggcaacggtcgtcacagaatggatgagtatcaaaggtaccctcagccgacagaaccgttggtttgtcagcctgctttctttggccaccatcgtacatgtgacttatcttatgatggcagtaatctgcgaaaaggatgcaatcgtatccattccgctcacaagtaccgttctgctgttctcggcagggttatggttcggatggagacaaaggaatttattctatctttccgccattccttttgccatactgatgattttactatccctgtttatctgtcacagtaaccttagggatgtcaacatatttctcctctcaggaattattgttatcaccggtaccactttattgatttatgcaatccttcacctaaaaaaacaatggtatggcacagaagagtaacctgacaatcgaagtcctttcaattatcggaggagtgctgaccgctatcttctttctgggatttctggcactttcctccattctccgatccgaaacatcctgtctgattgtaggaagtatcctgatcattactactttatttgtcaatcgcctcctgaccaaaccttttctggatgcgatgaatattacgtgctacatagccggatgtatattagccggttatggaatgaatagaaacatagatgtcctctttattgtactgatagggatcagtgtagtaacgatgctgttatccaaagggttcatcctgactttcctttcggtaatctcattctatatggcactgttcggagagataacgaatttattctcttcactgaatccgctgaatgtggctgccgtgcctattatagctattttcttattcgtcaatctatctgagacaaaaatactcagctatacgaacggggatttgtctaaatacaaacctattcattccggtctgttcgtatcgtgtgtcctttcattggccgggttgtctgtcaattacttgacaaaaagcacaaatgactggatcatatctgttttcatgttagtgggtatccttctgatggtttataaaatcatgcaggtgatgcaggttaagagtccggtacatcaggtgtgcatttatcttctttgtatcctgatctgccttcccagtctgcatgccccttatctatcgggcagtatcctgctgatactgatatgttttcagtacggttataaagctgagtccgcagttgcgctcctcctcttcatctattccctatccaaatattactatgatctggatatcaccttgctgacgaaatcgatcaccctgttcttcacgggaatcgcattgctcatagcctggtatattttcactcaaaaaaagacaagacatgaaaaaatatagccgaatactgattatcgctaatttactccttcttttgggatactttaactggtctgtttatcagaaagaacagacgctgaaagagggacaactcgtattattgcaactggctcctgtcgatccccgttctctgatgcaaggagattatatgaggcttaactataaagaagcaaattccgaattgataaacaggcaggaagctaaacgcggttatgccgtgctcaagctggacaagaatcacgtcggagaattaatacgtcttcaggaatcccttgaaccagtaaatgaaaatgagatcgtcctgaaatataaaacgataaatggcagattattcctcggtgccgaatccttcttttttgaagaaggacaggattctgtctataatcgtgccgcttatggtggattgagagtagataataaaggacagagtttactggtaggattgtatgacggggatttccggcagattaaaccgtacagaggcaaatgataatagtgtatataagaaaacaaaagaggatgccagtgggaaaaagggtggcatcctctataggggacaaatactaaaagagcactttcacaagcacaatctttgtattcagatcgcccttttgactcttttcacattctagtgaaaaagggattatagaagtcccgactttcacaagcatagacttccatatatttctcatgtgaaaactcctcatattgaggttaatggggaaaatagaatttcacatgagagtgggaaatttcattctgcgatgcagatacttacacgattttcttcaggggtggaataaggttgtacagtatcccccttgaaatctatgataatcctatcagctgcaatgccctttactttcaatgcttcagcaacatttttagcccgagtttcagatagcctgttattaattctcggattacctgtatttatatccgcataacctgtcacattcattcttgcagtaggatgctttttcatatattcaaccaaagaagcaatctttgattgctgatcatcttgaatacgtgcagaattcagagcgaaaaagatattctgtttcaaagtatctctgacagttatttcttttttcgactgatctactacaggagtaaactcagatttttctatcactgttgttggagttacttgctccacgtcatagtagacaggcactgtctttttataacttttaccaaaagtaaaagtaaaacctgccaaggcattgaactgccagtcagcattacggcccttctttgagttgaacttgtctgataacatattggtattcagctccagattaatccctacatgatcatttaaatgaagatttgctcccaaaccaccacgtcctccaacatatgctttcttacctgtccaaagatgatgtaatttatatccgttcgcatttaaggctacagcttcatcgttactaaatacgccattcaagcctactcccaaaaagagataagcattaaaaaaacgtttaggattaaaaccacaacacaaattacccagatcaagcatagcatctacactgccttgcaaatacttatatgtataagtagtagtcggggttacccaacctcctttggcttgccaaccgctagcctcagcccggagcccgaacaaaggagtaaacttatacccaagagatattgctattgacggagaaagtaaatctccaaaaccagcttcccccacagtataggcaccaccaccctggacagataaaaaccaatgcggattgtgaactatctttccttcctcttttatacgaggctggctgcttatactacctgactgttgagcaaaaactgcagtagagcacatcaaaaatgcaactaaaagaatgtgatatttattcttcatgttcgtactatataatttcaatttaaaacagaggacgctccttttattccctcggaacgtcctctgtaattatgagaagtcatacttttgcaagtcagactcctttatgaggaaaatatgactctgttattgagcatctttcgccaatttaacaggaatattacatattacgactgacaagtctttgaatgtaacagtagctgttacagtaagattgtaatctttcaccaaagtagaaccttgatttttccaagtaacaacacctgttgcatcatctacttccagtctagaatccttagacatattagaagtcagttcagtccaagcagcattttctacgaaagcatattctacgctaacaatatcattagtcaacttataagtatctgtagccttagagcttaataccaaagtttttgacgtattattgtaagaatagatattactaccttcattgtccttaacaacgacctgcggcattgttgcacctgtgttctcaccaataccattaccataaatgcttatgccattagtagtaccagcaacaaacggattaacgaatacaatgttatagttaaagttacagatttcatcgtttaccaaagtaaccttgtaagtcatgttcttaacatcgtcacgcttagtcatcgcttcagtcaatttcactgtttcatctgtgttgaatgaagtcaaaggatccggagtaactccagtaataccagttgcccactggaattgaagagcatttacgttatttaccttattgtaatattcaaagatattctcaccttccaggttagcaaaatgttcacttacaacagaagacatttcccaatatcctgaagtattctgccctttaattacgatacagtcatcataagttttgccatctgcaagagacttatatgtttcattgtaataaagaggattataaacataaggaacacattcttccttcacatagaatatttgttcaagtttgatatcaccatgtgagttatcattagaaggaataataatcttcactgaatacttagcacccttgccatcaatatctttataagtgttctgagacttaatttggttgttaacaccaaccttgatagctgaagtcttagtagcatcatcattcaacttaatattaagcaaaagtcccttattagagatcacaacatcagtttgctgagaaacttcttcactgatgattgtttcttcctgaccactcttattagtcacagtaaccaatacattatatttatgatcctgaccaccataataattccagaatgttgtagaagtcagcttagcagtaccataaatcttattattgatagcctgataatccatattaacgttatcaagagcataagtattggtaaatgcttgatcaccgctttctaatttatgataatcagcagctttaggatcagacatattaatagtgccataatcaggcttagttcccggagtaggatcttcttctgtaatagacagtttaatataagaagaagcaaccagtttcttcgcaccaccattgctagtcaagaaagcatctactcttaccaccggagtacgtccgatagccggagttccattaacgacttccggattaaccttgattacaccattatcaagtgtattttctccatcttttgtgatgaaccactgctgattagtcttctcgtcatcattagccagatatttctcaggtatagagaattcatagctcatgcccttgaagcccagtgcagccaaccattctgtcttattgtcagaatacaatccgacataatctttcagatcaatcgtactagtatatttaaacgcagcatttgcgtctgcatccaatgctacaaattgtttgatgaaagcatccgattcaccttttgctatagattgcgtacgattatagaatgttatagcagcctcaccttttacagtttttgcactatcggcgagtataagatctatttcttcagaagtaatatgaacgtaatcagaagtcagaggtttctgaccataccatgcctgtaaagcagcaatgttatattcttggttttcaaccaatgcattcgggttgacagtagcaccaattacaacaacaccattacttacactcttatcatttacattcaaaagaagagttctgtcatcggcagcacgagtagtgattttacgatcaataaaaccatataccgtttttgcatctacatttgcatcttccggattcagacggtagttcattgctacaacattggatttaccccagtctgactgtgctttgaaagtattattagcattatacttagtttcatccaaatagttcttaatatgatagaaaggattactagtagtagcatacggaacatcctggcttacaacatctggtatgaatgctatagaagacaaagcaatgcctgaaacaagatcaacagaaattgactcaccatcttttccctgcacgccagtaagtgtcaacacattaccattaaggactgcactaatacctccttcagatgcagccttccaactgatatctgtcgattcaacgaatttgttatctttccatatgtcaaagcatccggtttccggattaggtacatagtacagaccattttcaccaggtttaccatcttcgcccggtttgccgtctgcaccgggcttaccatctgcaccgggtttgccgtctgcaccagcttgaccatctacaccgacagctttgtattgagtcttcacaccatctttataccaatagccatcattttcgccaattgtccaaacagcagcgtctttaccagcagcaccgtccttgccgtttgtcagctcatagcttttaccatcgctgagcgttacagtaattccattttctcccttagtaacgttcgtgatgacagccccaccattcactttagcctgcaattcatccagtgacacttttacagcatcaatctgttgttgcagattgtcaatgtcatcatcgtagtccttacagcctacgtaggtgacagtagaaagtgctaacgccccgaagaacatcacttttacaaattttcttttcataactacttaaaaattacattaataatatattattaaacactaagtttcaataatgcctgtcccgttacttggtaggtaacgggtaaacctttgtggtaacctttataaagtagtttttgtagaaaacagattcaaaaagaatctaaatcttttacccctgcttagtagtagcggcagaggggaggaaaatcttttgccaaaatttaaggttaatacagtcttaatacaaagaatccgcagtatttgtcgtttatgtgttctttttttagtagtttatctgagaatttttcaattttgtttgcatgttttccaaaatatgtccatatttgcagcgctattcagtcccgttacctaccaagtaacagggtagtaatcaaactattattccaccaatagagcgtttcacaaaatcaacgatcctattatttgcttcatcaattttcctactacggaatggcttcagataagtttcggtcaccgtaatggaagaatgtcccattgcctcagaaatgatacctggatgaatttcacaataataagctgtcgtagcccaggtatgacgtgctgtatacgagctaagtttgctttccagtcccagccactgacctaacaattctaaatgctgattgaaactccgtaaggctaactgatattcccgatatgcttcctgacttccttcaatactatgaagaattgaaaacaaataaggagaactaagatcccgacttatgtgcttttctaataaaagcatagcttccggtgtcagagtcactgataaggaacgaccggtcttacgccgacgatacgttatcacgtttcctcttaaatcgcttttacgcaaataagccaaatcaacaaaaggtaaaccacgaagcagaaacatcagaataaacagttccttcgtacgacgtaaatctgaaggaattgtggatgatttcgacaaacgactaaaaacttttcgcatatcttcatcttccagcgcacgtttcctgtctgtacgtgttcctgtgtaaacagaacggaataaatgcgggatatattccgctttacgaagatcaactgcacgattataaaccgcacgcaacacacgaaggtaagtggaaactgtattccaactggaaccacgactgcgaagatagacttcaaaatctttcaaccattcgggatttacctgatgaaaatcaaggtatttactcccatgaaaggttgtcacaatgttcaaagtacttcgatacacatgggcagtcccaaagtttccctctgcccgtagcccatcggctactttcttaaaaaatgaaattaaattccccattgcataaactattagatatacactattaaatagatacacttcctactcttataataggagtgaacggtcaaaaaacaaagacctctcgacaaaagtttggaggcaaagaaacgaattttaattggatcagcatcaaaaacacgtattttgttgatttctgttgcttttacgcattataccataagttttcaaacaagggtttcacccttcaccttttctttgaagagctttattcatcagtgatagtgggtgaagggaggtaccttcacctctttcttcagacaagtcagatacaatcaaccgctcattttactctaatcgagcagtcaaccaaggtaaatcgaccgcttatttgtatacaatcgaccgctcgtttacatacaatcaataggatgtttaaaacaaacattgagaagaaaaaaataatctattagcatctttccattaggttatagttaatgcaaatatcattatagcaaaaacaaattagcttatagcaaaacgaatgatgctttcatgaacgaatgtcattttcagttcaaagggtgaataactaggccttcacccgatatcatcgataaataaaggatttcgaaggtaaagtgaaggtgaagataatatttataacatctcctgtatggcaacttaaagctatgctttagcaaccataaagcatagcttttggatatccaaagcattgctttatgaaagcgaagaatattataaacgaagctaaatggcagaaagactttaccaactaattttaaatacttagtttcctcctttttctacaacccacttctctatatttcgtgtcttggcactgaaattcactccaattttgaacaactcccgatcattggattcgaaaggctgagcgtaatgtttctcatttatctgtagcaatgcttcctccgctgtaccatccaatttaaactccatgatataaacgaaattatctgtctggagaacaagatcaatacgtccttcactagtatgatattctgctttaacatagaatcctattaacttgaaaacaataaaaagaacattttgataatgtaattccaaatcacgaatcaactcataaggtgtatcagcaaagaaactttgtaaacgtcgaaagaaagaatcataatctccggcccgtacttcacgaacaaacttctgaatctcaaatgccgattctaccgcattggtattcgcataaaaaggaagcaggaacttgataaatccttcttccacttcacgattaggaaatcctaaacgatagataccaaattcttcatcatatccttttatagtgagataaccactctgataaatgacaggtatcggattgtcggaagtagaatcaacactattcaagacttcagcactcgtttcttcgtgcgccattctctgaagatcataatgatgtttttttaataattctaccagataggtaggtgtaccggtttcgaaccaatagctgccaaattcattacgtaagaatgcattgagaagactaaacggattatacataccgatggaattatgagtaaaatggtaaccatcatagtattcacgcaatgcaacacatatttcattatatgtcattccacgagcatctgcaaattcagaaagttcaacctccagattatcatgcaattcttgatcactgactccacatatatctatatattgattccacatggagatatcgttgagattattcaaatcgctgaatacactaaccttaccaaacttcgtcacacctgtcagcatagcaaatttaatataaccatccatagacttcatcacgccgtaaaaggctttcaatgtactccggtattcttcctgcaactcatctctaccaatggcttgcaacattggtttgtcatactcgtcgacaagaatcaccacccgctgccctgttttttctgcagccagtctaattaaagtaaccaaacggtcatcgatcgtttcatcactggaacatgaaccgtattgagcttcgtaaacaagaagttgtcgatctatcagacggataaggtcattttcagtatcaaactttttagcattcagatccagatgaataaccggatattcaatccagtccttctccagactctccatcgccaatccttcgaaaagttcttttcttcctttaaaataagcttcaagagtagataacagcaaactttttccaaaacgacggggacgacttagaaaataataactgccagtctttaccaatttataaatcaacgcagttttatcaatgtaaaagtaaccatcttttcgaatcttttcaaagttctgtataccgataggataaattttactactcatattctcagggatttttgatttgcaatacacaaagatacttctttccaaacaaataacgccaagttacacacaaaagtttctatcacaaagctgcgcaaaaaaagaaccgcctcccccacagggaaagcggttccataccttatttttatgtccggaaaggaagaattacatcattccgcccatgccgcccattcccggagcgcccatcggcatttctggtttatcttctttcttttccacgatcacacattctgtagtcaggaacatacctgcgatagaagctgcattttcaagagccacacgagctactttagcaggatctactacaccggcagcatgcagattttcgtaaacatccgtacgggcattataaccgaagtcacctttaccttcacgtactttctgaacaactaccgcaccttccttgcctgcattggcaacaatttcgcgaagcggttcttcgatagcacgtttgatgataccgatacctgttgtttcgtccgcattgtcacccttcatgccttcaagagaatcgatagcacggatgtaagcaacgccaccacccgggatgataccttcttcgatagcagcgcgagttgcacgcaatgcatcgtctacacggtctttcttttctttcatttctacttcagaagcagcacctacatagagaactgctacaccacctgacaatttagccagacgttcctgcaatttctcacggtcgtaatctgatttagtagcaacgatctgagccttgatctgatcgcaacgttccttgatgttttctttcacaccggcaccgtttacgattgttgtataatctttagaaactgttaccttgtcagcagtaccgagcatttcgattgtagcctgttccagtttcagacctttttcctcgctgattaccacaccacctgtcaggatagcgatatcttccagcatttctttacgacggtcgccgaagcccggagccttcacagcacaaatcttcagctgagaacgcagacggtttactaccaatgtagtcaacgcttcgctatccacatcttctgcgataaccaacagaggacgacctgtctgaacagccggttcaaggataggcaagaaatctttgaggttagaaatcttcttgtcgtagatcagaatgtaaggtttctccatctcacattccatcttttccgtattagtaacgaaataagcagacagataaccacggtcgaactgcataccttctactacaccgatagtagtgtcagtacctttagcttcttcgatagtgattacaccatccttagaaactttacgcatagcgtcagcaatcaatttaccgattaccggatcattgttggcagatacagtagcaacctgttcgatcttgtcgtagttgtcacctacagtttcagcttgtgccttgattgattctaccactttggcaacagccttgtcgataccacgtttgatatccatcgggcttgcaccggcagtcacattcttcaaaccttcagctacgatagcctgagccaaaacagttgcagtagttgtaccgtcacctgcatcgtcaccagtcttagaagcgacttctttcaccagttgtgcaccggtattttggtaagggtctgccaattcgatttcctttgctactgtcacaccgtcttttgtgatgtgcggagcaccgaatttcttttcgatgataacgttacgtcctttcgggccaagagttacttttactgcatttgccaatgcatcgacaccttttttcaattggtcgcgggcatcgatattgaataatatttcttttgccataatgatatcttatttattttaaaatgataaattttgaattttgaattaacccaagatagcgagaacatcgctctgacgcatgataaggtatttagtgccttctacttcaagttctgttccggcatacttgccataaagaactgtatcgcctactttcaataccatttcttcgtctttcgttccgtgaccaactgccacaacttcacccttcaaaggtttttcttttgctgtatcaggaataatgataccaccaattgttttttcttctgcaggtgcagggaggataagcactctgtctgctaatggtttaatgttcatagttcttttttttgattttatttgttatacattatattcatgatttgtcctcttcttgaagaagacgctaaatcagttgcgaaaagtatgccaaagcaaaataatgattgtttggcagaaattgactgacaaaatgactgacaacaggttattaatggcaaaaaagcatatttgttccacactttttaaacaatagaagcggattattccttataataacgtatattcgtaaatgaaccccaagataaactgtatagattatatgaataaaataagttttggcatatccatcgctttttgcgtactctattcctgcacttcgcgtacaggacaaaaaacttctgaagagactttacaggctgattcactggcacaggacacgattgcggaaactgtggcagaacctgtcgtcaaaaagattactccggaagaaattcaaatcaccaaagagctgctgtatgataaatacacactggaagatacatatccttataaagatacgacccgcagtttccaatgggacaaaataaaagaacagcttgccctgctcgaaaacatacaactgcagccgtctcaatgggctatcctccagaattacaaaaacagaaacggtgaagctccattggtgaaaaacttcaaaagaaatgcctacggacgggtagcggatacgcttggggtagaacgataccagtctgtcccgctttatctgctgacggatacgatagcacccgaacgctacgggcaggatggtgaactgacgcgttttattgaggacggagaaaactttgtcaaagcagaaccgatatttacagaaggcgaatggatgattcctaaaaagtatgtcaaagtgatcggagatacggtggttttcaataaagcaatctttgtggaccgccataatcagaacattaccgcactggaacgcacggaaaaagggaaatgggtagtacgcagtatgaacccttctactaccggacttcaccgaccgccgtatgcgcaggaaactcctttaggaatgttcgtactgcaggaaaagaaagtgaaaatgatatttctgaaagacggctcgaaagagacaggaggctacgcgccttacgccagccgcttcacggacggagcctacattcacggagtacctgtcaacgagccccgaaagacacagatagaatatagctggtcactgggaaccactccccgatcacatatgtgtgtacggaacgcaacttcccatgccaaatttattttcgactgggcacctgttaatgagacgattatttttgttttggaataaaaatccctatctttaccgcgtttttatttcaagcttaagccctatgcttcagaaagttatattatttttatcattccttttcattccattcagccatgtttcagtcgacacaatggccgttcctgcatctgactctccgactcctgtgtccgaattagctgccggcgaacagctctttgaagaaatggagttgggtggaattgtcaatttcattgcattccgtcaggctgtcgccggttacaaccgcatcaaggagaagagtaaaccgattctgacgctgattgacttctcaaagccgtctaccgaaaaacgtttttttgtcttcgatatggagaagaaacaactgctgttttcatcagtagtctcacacggacgaaacagtggagggaactatgccacttctttttccaaccaaaacggctcttataaaagttcattgggattttatctcactgaaaacacttaccaaggcggaaacggctactcactcatcctaaacggactcgaaaaaggaatcaatgacaaagcaaaagaacgttccatcgtcgtgcacggggcttcatacgccaatccgacagtagccgcctcgggacgtttggggagaagtctgggatgtcctgccctcccgacaaaactagccaagcccatcattaatacaattaaagatggcagtgttatgtttatctatgccaataatagcagctatctggctcaaagcgacatcttaaaaaacgtcagtgcccccatgccggcactctaaacagtctttatcagaaggagctgcacggactaaccgcacaaaggaataacgactttactttatcggcagggtaaaccagaagcaagagcctttctccggttcactatctacgccaatctcgccacccaattgttccacaatactgcggcaaatggaaagtccgagccctgtgccatgtacaaaggaattcagtttgacgaaacgctcaaaaatctcgttctgcatttccggctcaatgccaatgcctgtatcggcaacgtagaaacgcagatgagcctcatcaagctgatcatagcctacccgtatatttccttcttccgtgaatttaatcgcattgtttacaaagttggaaataacctgatgtaatcgattgcggtcactcatgatgcgacattccggcagatggcggtcaaaaaggatttccacgttcggtctggccttcattctcatagcgagaacaatatcttcacaaagcagatttacgtccaactcacgttcggtgaaatcgaatgttcccgcctcaatcttcgataagtcaagaatatctgaaatcaattgtaataacaggtcattgttttcttccacaatatccatgtactgccgtctttcctccatatcctccgtatccaccatcaggctggaaaaaccgactatggcattcagcggagtgcgtatctcatgactcatattggcaaggaaagcagacttcaaccggtcggattcttcggctttctcttttgcctctatcagtttggcttccgtttctttcaaggcagtgatatcatagttgactccaatcaattccacttgtcctttttccggctcatagagattcaacactacattagtacgtacccaattccattcattcttcgtaccgggacgcaaaatacgcatctcacctttgaaggcttttgctttccctttctttgcttcttcaaaaaaagcaagcatacgggaacggtcatccggatgcattttggagtaaacaccgactacatcggaaagaggtgtattctcatcttctcccatattcttgaaccattgcttgatggcatagccctgacgattcagcagattgagtttggcatatcccaccttggcataatcagatataagaagaaacagattctcaaaatcagaaatacgcttcaaggcatcaatacgctccgtattatccatattgataaggatatatccggtaaggttaccatgattatcatataatttgcggacttttgtataaagttcgatgacaccggctttcaatggacgataatatcccgtgtggcgggcacattcgaacgaataacgggcacgaaaatccgtaatactgctcttgcgtatactctcaagtatctgggcatccacattcggtttttcaaagaaattgagcccgatcacctccgacttatccgcaattcccagcatatccatatctctttcgttcaaatccaccagattaccatccttatcgtaaatctctactccggcaggaatattggtgaagatatttttgaagagtctttcactacgtgccaaagctgcttgttcaaagaccactttctctttcgccctgcgcagttcaagacaaatactgattacattggccaaagaagacagccagcgataatcttcgtccgaccatgaagcggaaccatctaccaaatctactcccataaatccatagacatgatcattgactaccaacggagtcgccatcaaagccttgattccctgacgggacaacacctcatattcgccctgccccattccagacatcggctttaatgtttcaaatagaataggcttcttgcccaatatctgtgatgtccaccacggcatgaagtctaccggaatttcctgcaattcatttatttccgcttttactccttccgctacaacttcataggtacagttataaaaatgattttcttcgtccgtctcaaaaatataagcacgtcccgcccgatagaaagccagaatatcttttaatatctcataaattcctgtctctacttcttcatctttcagaaaacgggacaaagaccgtgaaattgagttctgataataaagcaaatcattgatacggtgtgagatggtttccgttttttcatattccaccttttcgacagatttctgttcaaagtctgccgcatgttcagccacatatttccataagggggcggcgttgagtgactgcatgatctcattgttttccagcagttgtttcacttcttcaaaagtcagcagatgtacagacaaatcttcggtatcttccagatgttgatgatctatcggttcgacatccgtagctaggaagcaatgagtcaggttggtatgcgtactcggattggcagatatcaccatgtattcccgccagtttccttttccatatccggtctcctcccacagttcgcgctgagcggaaactaatggggaagcatcctctttatcacaaactccggcacagagttcataagaggtacgtcccaatccaggacgatactgacggacaaatacaaatttgccgtctttggttattgctatcgtgtttacccaatcgggatattcaagaatataatattcagggatgtggtttccattaggtaatagcatatcttcgcagcgaactgtcaaccacgggcggcgaaacagatatttgctacttactgttttccaggccttctctttctcttccatcattatttggtttgcttgcggcaaaagtaatgattttagccggataactattgccctatacaaacaaatatctgttttttactcgcaagtgatctctattgtctgtacctgttcgaggtacttctttgtagcactaaccagcgaactccccatataataccaaaacatcaggctgatgatgatcatcaatgcaccgatcatcgcaaaacgacttctttgttccaacatactgctactcatatctcttctcctctcttattttatgttttacaaagataacaccgaaatgctacaaaaaattgacaagaatgtttcaaaaaccttaaatattgaatttatttaaccaaccggagggaaatagtctcctgcatacaggctgttttatccttccggaaatattaatgtaacaatctgctacattcaatttaacgattattagtttatccgcaaactagttactatctttgcacccactaacaacccttttaattactatatggcttttactaataatattatgattgtccggcataaattgctggctgatctcgtcagactctggaaaaacgaccagttagtagaaaaaattgaccgtctccctattgagctgagtccgcgcaaatcaaaaccgctggggcgttgctgcgtacacaaagaacgtgctgtatggagatacaagaccttcccgctgatgggactggatatgaccgatgaacacgatgaagtaactcctctctccgaatatgcacggatggcactgaaccgcccggagccaagtaaggaaaatatcatgtgtgtcattgacgaagcctgttcttcctgcgtacagattaattacgaaatcaccaatctttgccgaggatgtgtggcacgcagctgctatatgaattgccctaaggatgcaatacgtttcaagaaaaacggtcaggcgatgattgatcatgatacttgcgtcagttgcggtatctgccataagagttgtccttatcacgcgattgtatatatccccgttccttgcgaagaatcctgcccggtgaaagctatcagcaaagatgagcatggcgtggaacatattgacgaaagcaagtgcatctactgtggaaaatgtatgaatgcctgcccgttcggtgctatctttgagatttcacaaacctttgatgtactgcaacacatcaaaaaaggagaaaagttggtagctatcatcgctccgtctatcctcggacagttcaagacttctatcgaacaggtatacggtgcctttaaagaaataggattcaccgacattatcgaagtagccgaaggagccatgatgaccaccagcaacgaggcacacgaactgctggaaaaactggaagaaggtcagaaattcatgactacctcctgctgtccttcatacattgaactggtagaaaagcacatgacggaaatgaaaccgtacgtttctaccacaggatcaccgatgtattatgcggcacgaatcgccaaagagaaacatccggatgcgaagattgtatttgtcggtccgtgcgtagccaaacgaaaagaggtacgccgtgacgatgctgtagactatatcctgacattcgaggaagtaggttctatcttggatggaatggacattcagctggaacaggtgaattctttctctatactgcatacttccgtccgtgaagcacatggttttgcacaagccggtggtgtgatgggagccgtaaaagcatatctgaaagaagaagcggataagatcaatgctatccaagtgtcggatatcaacaaaaaaaatatagccttgctgcgtgcctgtgccaaaacaggaaaagcagcgggacagtttatcgaagtgatggcttgcgaaggtggctgtatcaccggaccgagtacgcacaacgacattgtttcaggacgtcgtcaattagcacaagagttgctcaagcggaaagaaagctatgagacaatggatagataaactgcgagaagaaaggacactccgaccggaagaattccggcaactgctgaccgaatgtgacggagaatcattgcgctatatcaataaacaggcgcaagaagtcagtctccgtcatttcggaaaccggatttttattcgcggactgattgaagtcagtaactgttgccgaaataactgccattactgcggtatccggaaagggaatccgaatctggaacgttatcggttatccacagaaaatatactgaattgctgcaaacaagggtatggactcggcttccgtacctttgtgctgcaaggaggagaagaccccgcactgacagaggaacggatagaggatatagtctcaacgattcgccggagttatcccgattgcgccataacactgtcactcggtgaaaagtcgcgggaagcatacgagcgtttctttcaggcaggtgccaaccgctatctgctgcgtcatgagacttatgacaaagaacattatcaacaactgcaccctgccggtatgtcatgcgagcatcgtctgcaatgcttacgggatttaaaggagatcggctatcagacaggcaccggaatcatggtcggcagtccgggacagaccatagaacacttgattcaggatattctgtttatcgaacagcttcgtcccgaaatgattggtatcggtcccttcctgcctcatcgcgaaacgccttttgcccagtctcccagcggaaccgtggaacagacgctccttttattatccatcttccgtctgatgcatccgtcagcgctgattccggcaactacggcactggctactctcactcccgatggacgggaacagggaatactggcaggcgccaatgtagtcatgcccaatttgtcgccacaggaagaacgaaaaaagtacaatctgtataataacaaagcctccctcggagcagaatctgcggaaggacttaacatattgcaacagcagctggaaaagatcggttatcaaatctccttctccagaggcgattacaaacaataaagaaatgtataaagtagattcaccccaagcagaagaattcattcatcatgaagagattctggaaactcttgaatatgcacggagtcacaaagacaaccgcacattcatagaacagctgatcgagaaagccgctctttgcaagggactgacgcaccgcgaagcagctaccctgctggaatgtgaccaacctgacctgatagaacgaatcttccatctcgccaaagaaatcaaacagaagttttacggcaaccgtatcgttatgttcgcaccgctttatctgtcgaactattgcgtaaacggatgcgtatattgcccttatcacgccaagaacaaaacaatcgcccgcaagaaactgacgcaggaagaaatacgcaaggaagtaatcgctttgcaggatatggggcataaacgtctggcacttgaagccggcgaacatccgactctcaactcactggaatatatactggaatccatccggaccatttatagtatcagacacaagaatggggctatccgccgtgtaaacgtaaatatcgccgccactaccgtcgagaactatcgccgattgaaagatgccggcatcggcacgtatatcctatttcaggaaacttatcacaaagagaactacgaagctctccaccccaccggaccgaaaagtaactatgcgtatcataccgaagcaatggaccgcgccatggaaggcggcatagacgatgtaggaatgggagtacttttcggactgaatacctatcgctatgacttcgtaggattattgatgcatgcagaacatctggaagcccgtttcggtgtgggtccgcacactatcagcgtaccgcgcatctgttcggcggacgatatcgatgcgggagattttcccaatgcgatttccgatgatatattcagcaagattgttgctgtcatccggatagcggttccttacaccggcatgattatatccacacgtgaatcacaggagtcccgcgaaaaagtgcttgaactcggtatctcacaaatcagcggcggctcccgcaccagcgtaggcggctatgcggaaacggaacttccggaagataactccgcacaatttgatgtaagcgacacccggacactggacgaagtggtcaactggctgctcgaatcaggatatatccccagcttctgcaccgcttgctatcgggaaggacgcaccggggaccgatttatgtccttagtcaaatcaggacagatagccaactgctgcggccccaatgcattaatgactctgaaagaatacctcgaagattatgcatcggaagacacccgaatcaaaggtatgaagctgatagccaaagagaccgaccggattccgaatcccaaaatcagagaaatagccatccggaacttaaaagatatttcggaaggaaaaagagatttcagattttaaggggcaaggtgcccctgccaagtttccatgcggataattaacgttacaacaattgcttgatttatgaatttagtccacacccccaatgccaaccggctccacatcgccctcttcggaaagcgtaacagtggaaaatcctccctgatcaatgcactgaccggacaggataccgctcttgtttccgatactcccggaacaacgaccgaccccgtgcaaaaagcaatggaaattcacggtatcggtccttgtctgttcattgatactccgggatttgacgatgaaggtgagttaggaaacaggcgtatcgaacgcacatggaaagccgtagagaaaaccgatatcgcccttctgctttgcgcaggtggtagctctgcagaggaaaccggagaaccggactttaccgaagaacttcattggctggaacaactcaaggcaaaaaacatcccgaccattctgcttatcaacaaggcagatatacggaagaacaccgcatcccttgccatccggataaaggagacttttggaagccagccgattcctgtcagtgccaaagagaagacaggcatcgaactgatacgacaagccattctggaaaagttgccggaagatttcgatcagcaaagtattgctggcaacctggtaacggaaggagatcttgtcctactggtcatgccacaagatattcaagcccccaaagggaggcttattttgccacaagtgcagacaatgcgggaattgctcgacaagaaatgtctgatcatgagctgcaccacagataagttacgggaaacgttgcaagccctctcccgccctcctaaactgattattacggactcacaagtctttaaaacagtctacgagcaaaagcctgaagaaagcagactgacctctttttctgttctttttgcaggttataaaggagatatccggtactatgtgaaaagtgcctcagccatcggaagcctgacagaatcttcccgtgtactgatagccgaagcctgcacacacgcccctctatccgaagacatcgggagagtaaaacttccgcatctgttaagaaagcggattggagaaaagttatcgatagatatcgtggcgggaactgatttcccgcaggacctcactccttattctttggtaatccattgcggcgcttgtatgttcaaccgcaaatatgtgctgaaccgcatcgaaagagcaaggttacaaaatgtaccgatgacaaattacggagtagctatcgctttccttaacgggatacttaatcaaatagaatattataataaaaagaacagaaccttgcagacttcaagcatttgtcttatattagtcacgcaatcaaatatttattaactttagacataaacaaatgaaaaagagaactatggctttggccatctttctggcaaccggtgttactatgcaagcacaagaccgactgacacagtacaaagtccggaatgccatcagcgttcgtacccccattatgaacgacagcatcaatcctaaaggagaaaaacacaccaaaaagatgttactccaaaccccggtcgtactacatttgccggatgcaccgatgcagtcgctcactgcggacacagcggggtatctcagcttcgagaaagcagataaagacaataaactttatctggttaagactcagattcgtgcagaacgtttcctgaaagggaagttgaaaatcacctcccccgtccgctgggaagtcttcattgacggagcctccaagcaagtaaaagatgcggcagaagacagcatcacctccggctcatcacgtgacatcgctctcagccttgaaccggagcgggattacgagataatcatcaaactgctttctgcttccgatgacaaagcggcaccaacactgaaatgcgaactgatcaaagacgagaaattcaaggataccgcctgcaatctagatccggaagcaaagaagcgtttttctctagacaatacagtttatggcaaccgtgccatcgctgtttccatctctcccagcggaaagtatctgctgacccgttattgggataaccacgccgccaaacgctcacgcacttattgcgaactgacggaactaaagagcggaaaagtactcctgaccaatctcagagacggcatgagctggatgcccaaaagtgataagttatactacacggtaaccgccctgacaggaaatgacgtaatcaccctcgaccctgccacactccgcgaagaaacgattttgcaaagtattcccgaacagagtttcagatggtcgcccaacgaagattttctgatttactatccccgcgaagaaggagtcaaagaaaatggtcctctccgccgcatcgtaagtcctgcagaccgtattcccaattcccgcggacggagtttccttgcgaaatacaacctagccgacggtgtctccgagcgcctgacttatggcaaccacagcacatatctgcaagatatttctccggacggaaaatacatgttatacagtacatccaaagaaaacatcactcaacgtccgttctctctgtcctcactttatcaggtaaatttggaaacgttgaaagtggatacccttttctatgaagaccgctttatcggaggtgcgggctactctcctgacggcaagcagctattgctgaccggcagccccgaagcgttcggtggcatcggaaagaattgtggcaatcaccctattgccaatgatttcgatactcaggcctttattatggatctgagtacccgcaagatacaaccgattaccaaagactttaatccgacagtcagccctctgcaatggaatcatggcgatgggtgcatctatttcaatacggacgatggcgattgcaaaaacatctatcgttattctccgaaggatggaaaatttgagaagctgaaccttgaaacggatgttaccagcgctttcgctctgtccgaatacaatccgggcatcgcagcttacatcggtcaatcggactacaatgccggagtagcctatctctatgacatgaagaaaaaaacttccagcctgcttgccgatccgatgaaaccgattctggagaaaatagaattaggcaaaacagagccgtggaactttaccgcttccgacggaactgtcatcactggcaagatgtgcctgcctccgaatttcgatctgaacaagaaatatccgatgatcgtatattactatggcggtacgactccgactacccgcggaatcagtaatccgtattgcgcacaattattcgcttcacgtgactatgtggtctacgtcatccagcctagcggaacgattggcttcggacaggaattctccgcccgccacgtcaatgcgtggggcaaacgtacggcagatgacatcatcgaaggtacgaagcagttctgcaaagagcatccgtttgtggatgaaaagaaaatcggttgcctcggtgcttcttatggcggattcatgacgcagtatttacagacgcagacggatattttcgccgctgccgtgtcgcacgccggaatcagtgacgtgaccagctactggggggaaggttactggggatattcctacaatgccatcgccgcagccgacagttacccgtggaaggacccggacttgttcaccaaacaaggctccctgttcaacgccgacaagataaacactccgttattgctgctacacggtacggtagataccaatgtgcctatcggtgaaagtatccagcttttcaacgcgttgaagatacttggcaagactgtagagttcgtgaccgtagacggagaaaaccatttcatctccgattatgacaagcgaatcaaatggcataattctatcatggcatggtttgcccgttggttacaggatcaaccggaatggtggaaggaaatgtatccggaacgccatttataatttatgataaatacgtatccccggtcgtacacaagaataattcttggatatacgaccggggatacttctactttgcaatctcatctattttaattctacctcgatagctgccggataaagtcgttgcggatcgaagaacaccgcacagctattaaccatattcttcaaatcagcctttacttttccttcgaaaacctttttgccattcaccgtcagagtcaccttttcagttaaatcgaccagctcgtcgcagagataaatgaccactttccctttatgcgcctgcgcatatttcttcgcaaacttcatctctattccccatcgttgatccttctccgtagcttcataaacaacatcatcgaccttcaatgaaatatgatttcccgaaatactcatttcataataagtacgcgacttcccctcttcatcggatctttccttcacatacagattataaaatcctttccggtagagtccgtccatttcaaaattctcccagcttacatatttgggataaggattgcggacatattgcttcagccagggagtcgtcggacgataatcaatactatgccccattccgggaatcagttctatcttgtgagtgaaatagccgggatgctgatgcgccaaactatcgaatgcttcccgtacatatccggtcagtgtattccggtagaatccggtatccttatctcctgtccgcaaagaaaaagcaatattactacaattctccgcaggagcattctttaaaggttcccctcctgccatcggtcccgcagcagcccaataatcagcataaaatgaggccagacgctgactgccatatccgccttccgagattccgaaaacatacactctgttgggatcaatctttcccaagagtaaggattgtcgcagcaatttctcccaggcaaactgtttagctttctgccaccaacgatagtactcgccttcgttcggaatctgtggaataaagtaaacggaaggagcatcatcaaaattccggcaaattttcaacccggtactccattcccgttctttgggtcccgagccatgcagatagaggaataatggaagttcatttcctgttccatctgtccctttcattccccagtaatagggcatcacagcatttggttccaaactatcaggaagtttccagtagccggaagaagcggatgagagtgtatccaaagctattaatttttcttctttaaaaccatcatttgcctctttccacaactgccatacgacatcacgatagtgttctacctctgacagtttcaacggttttcctgcgtcaaaagtggttgtcttaccggaaagagattcagaaaagaacgtaacaatctcttttcttgtctgtgtcttcactgacttcccggggtaattctcatttgcttcgagttcatgagctgctgaagaaacaacactggcggcacagactatgcctagaacgaacgtgttttttattgttttcatactactttggagtttgtcgtttttcatatatttgctaacgatttaatgtatgcacaaagatagaaattactgtccggttctccttaccttttcagtctaatctaaaaactaatatccaaagtttttaattaagaagtggaattaagccttccgagaatatgagcacacgaagaagtcgttacatataattaccatttcatcctatatagtttctgatagtcggttttcattcggagccgcatctttatatctttacaaaaacaaaaacggcctttaataaacacggattctgtttataataaacttattgcacgtttattataaacggtatccaagtttattaaaaacgatattcgtcccttttaaagtacgagacgaaatgtagcaggcataattaacgacaaaatggggcaataatcatctgatcattgccccattccaagttcttctgatacttataagtaacagtataaaggtgatatttatgtatctatttttcttattatattcattttatttatgccttttcttttcccaaagatacaacataaaaagtcatttgtcaagtacttcaccggaaaagcggatattcttactctataccctgcttttagttgcgtaaagcagctatcagttcttccaccgaaacaagattctgttcgccggtttccatattcttcagcattgctttgccttcgttcatttcgttctctcctacgatagctacgaacggaatactcttggcattggcatagctcatctgtttcttcatctttgccgcatccgggaagatttccgcacggatacctgccgcacgaacttttgccagcatactcatagagaaagcagcttctttatcaccaaagtttacgaacatcaattccgtaccgttcactgcttccttcggataaagttccagttgattcaatacatcgaagatacggtctgcaccaaaagaaatgccgactcccgacacaccggacataccgaatactcctgtcaggttgtcatagcgaccaccaccggtgatactgccgatctgcacgtccagcgctttcacttcgaagatagcaccggtataataattcaatccgcgagccagcgtcaagtcaagttcgatctcatttttcaagcccattgtttccagtgtgcccagaataaattcgctttcttccactcctttcatgcctgtttcactggctgccagcacgctctttagtgtagccagcttttcagtattggttccgctcagcagaatgatcggctgcaatttggcaatcgcctcatcactgatccctttctctttcagttccgcattgacgttctccagaccaatcttatccagcttatcaatagccactgtgatatctacaatcttatccgcttcaccgataatctcagcgataccggaaagaatcttgcggttattgatcttaatgcacacacggatgttgaaacggctgaatactgtatcgacaatctgcatcagttctacttcattcagcagtgaatcgctgccgacaacatcagcgtcgcattgatagaactcacggtaacgtcctttctgcggacggtctgcacgccataccggctgtatctgataacgcttgaacggaaaagttatttcatcgcggtgcatcaccacgtaacgggcaaaaggcactgtcaagtcatagcgcaaacctttctcacagaatttgcttgccagcttaacagcattacgattcaataactcttcatccgtgatgccggaaaaataatctccggagttctgaatcttaaatagaagtttgtcaccctcatcgccatatttccccatcagtgtagaaagcatctccatcgacggagtttctatctgctggaaaccatacagatgatatacgtcacgaatcgtattgaatatataattacgcttcgccatttctaccggcgaaaagtcacgagttcctttaggaatacttggttttgctgccatgatataattactgtttagtattttaattgcgcaaatttactgcaaatttccgagcaacgcttgcatatatctaaaaaaaacatcaataaaaaaagaacgcctccatagtctttgaaaacgatggaggcgtcaaaacgattaatcttttctcttagtctcttctgcccatagcaatcataatgtaatagatcagcgtagccaatgaacccagtgcagcaactacataggtgtatgcagcagagcgaagagcgtcttcggcttgcgtatgattgtatgaattagtaatgccggatgaactcagccacacaagcgcacgcttacttgcattgatttccaccggcaaggtgataaagctgaacaaagtggtggtagcaaacagaatgataccaatccacaacaattgcgggaatgagttgaacagcagaataccgcccagcaatacccaagtcatgatagaggacgaaaaattcactaccggcaccaaggcgctgcgcattttcaacggagcatacatacgtgcgtgctgaacagcgtgtccacattcgtgtgccgctacggcagccgccatgatactattactttcatatacaccttcactcagattcactgttttgttagcaggattgtagtggtcggtcagctgaccgggtgtatgagttacttgtacatcgtaaattccattgtcgtgcagcatcttcagagctacgtcgcgtcctgtcataccgtttcctgtcggaattttggaatacttcttgaatttgttctgcaaattcatctgtaccaaccaacttgctacggcaataccaataaataatacccaataagacatcatatacttttcattttaattattactctatatttctataaacaaattgtttgccaaaaataaagggaaactacgtatgtaacgatagtttccctatgcttttatgaagaattagctaaaaattagtcaattgtaagttctacaacgtaatcaatatcttttggtatctctgcaagctccagcaacacgccttctttatttttattgaagcggacaggtgtgccgttcttaaacagtactgctttcttcaccttcttatctgccaaaggcaggaacagggctttatcctgcaaattcagaatgtgcacatacagcttgtttcctttctgcgtcgtcactccccagtcatgcggagcaaccgcaccgccacgggttccataaatcgtttcaccatattgattcatccactctcccatttctttcaaccgctgtacggctacttccggaagctctccgtcgggctgagggccgatattcatcaacaggtttgcattctttccggctgcctttaccagataatgaatcagcgtcttcgttgatttataattttgatccgtaatcttatatccccacataccattcatcgtttcgcaggtttccaaaggcaggtgacttacactttgtccggaaagtcctgcggtattttctccgggcaggtcacgttcgaatatctgaatatcttcaccggcaaaaggagtctgatgatgattatttcctatcaggcagcccggctgtagtttatggatcatggcatattgttccggcaactcccagttaaagccgggatttccatcctgatcccaccatccgtcgaaccaaatggctcctaccggaccataattagtcagcagttccgtcagctgattgttcatgaactgataatagcttttccagtctcctttcggattcggacgtcctgtaccccgtcctgtacgaccccaaggataatcttcccgcgtccagtcaagatgagagtagtagaaatggagtttgattccctgtttgctgcaggctgctgccagctccttgatgatatcccgcttaaagggagttgccttcacgatattgaagtccgaatattgggtatcgaacatggagaagccgtcatgatggcgggaagtcaggcagatatatttagctcccgacgctttgatggcagccacccacttatccgcatcaaacttggagggatagaagccgcctgccagtttggcatactctttataattcagattattatttgtcatagtccactcaccggtggcaagcatggcatacagtccccaatgaaggaaaataccgaatttattatcctgaaattcttcacgggctttgaggttttcttcaccaggctggtaagaagactgtgcgtggagccgggaggagattcccagactcatacctattaaaaataggaaagtaatgaaatgtgttttcataatgcgttatagttaatattgggggtaaagaaaaaacaaaaaggcggagtaatttccatttctccgcctctcattaagttatagaacaaaggagaccaaaagcaatagtatcatcaattcccctccttccaggaggagacttaagatactaccggactttttagtcagccccatttcttattcttcagtataacgttcgattgtctgcgctctgtccggtccgacagatacaatcttaatttccacaccaagttgttcttccaggaaagtcagataagcattgaattcttccgggaattcatcttcgctctgcatctttgtcatatctgtcttccagcccggcagttctgcatatacaggttccacaccttcagtgatgtcatatgggaaataatcaatttcctcgccatctaccttataagcaacacaagccttgatggtatcgaatgtatcgagcacgtcgctcttcatcatgatcagtttggtaacaccgtttatcataacggaatatttcagagctaccaggtcaatccatccgcaacgacgtttacgtcctgttacagaaccgaattcatgtcccagtgtgcacatcttgtcaccagtctcgtcgaacagttctgtcgggaacggaccggcacctacacgagtacagtatgccttgaagataccgaacacctcgccgatacggttcggagctactcccagaccggtgcaggcacctgcacaaaccgtattggaagatgtaacaaacggatacgaaccgaaatcgatatcaagcatcgttccctgagcaccttcgcaaagaacgctcttgccgtctttcagatagttgttaacctcatgctcactgtctacaaaatggaactgtttcagatattcgataccttccatccatgctttttccagttctgtgaggtcatattcgtagttcagacttttcaggatttgttcgtgacgagctttcgccgcaccgtatttctgttcgaagttatgaaggatatcacctacacgaacaccgttacggctaactttatccgtataagtagggccaatgcctttaccggttgttcctactttcgcatctcccttggctgcttcgtaagcggcgtccagtatgcggtgtgtcggaaggatgagatgagctttcttagaaatatgcaaacgctctttcaatgggtgtcccgatgcttcgagtgcctcggcttccgctttgaacaatgccggatcgagcactacaccgttaccgataatatttaccttatctccctgaaaaataccggaaggaatagaacgaagtacatacttctgtccttcgaactcaagtgtatgaccggcattcggaccgccctggaaacgagcgaccacatcgtacttaggtgttaatacgtcgactactttacctttaccttcgtcgccccattgtaatcctaatagaacatctactttcatttttcttttttattgttgttactgacttttttccgtttattagctctgtcgcacttgctgcacaatccatatatatataaggagtaatgcgaaagttgaaagcggcttaattttgtattttcgatggcatgctgcaattcctcgttctgaaactcggtcactttgccgcattgagtacatatctgatgatgatgtgtctcgcgattgtatgatttttcgtattgggaggaagtgccgaactgatgcttgatgatcagccgcgcattgataagcagaataatagtattataaagagttgcccggctcacccggaaattctcctgatccatcattctggaatagagcatatcgatatcgaaatgtccgtcgatggaatagatagtttcgagtatggcgtaacgttcgggagtcttacgatgcccgttcgccgtgagatattctgtgaatatctgccttactgtatctttcacattttgagtttccatcatcagcacaaaattagcgcgaacaaagttaagccttttttgtggaaagcaaaagaatttctgagaataagtaataagtattaagtaataagtattaagtaataagtattaggtattaaccgtagctacttagattccatgcggcggatatccgcatggtaatacttaatacttattacttaatacttatcactagcttcttcttttaccatattatagagcatctgctccgcttccactgtggaatctgccattccttcaaccatccggcatacacggaaagcatgttcttcgttatgctgcatatacttacggatagccagaagagctgcattccgcacatgatagctttctgaatgaacagcgcaaagtgcctggtcgagcaattcgccggaggctctttctgtcatatctccctttttcatcaaaagacgggcagccgtcaggaaaccgcatgtctgcacatattcctgttcatcagccatccaatgaaaagatttagcaggagcatatggcaaatgctggaaaagattcatacaggtcagttccgcaatctctatgttacggatactttctacccagatatcagctatctcgggataaaaggtatctacaggctgcaacatggctgccatgattttgcattcgcgaatgtcttctttccacaatgcctgcgccaggtcatggttcttttcatacccttcgacaatcatctttatgcgggggatttcgactccgaaattgagtttgtataccaatcccttctcacgcatactttgggacacagccccgttcatagagagacggagctgtgttttgatatctttcagttgttcttttatatccattttcaatattaattatttacggaaggcaacggagaataatctttgctgtaacgcaacatttgttctacatagtcttcgtcataagacacggtaacatccgtgatatttccatccttgtcagtcaccagttcatagaccggatttacaaaacctttgtaaggagccagattcagcttcttatagcgtgccaacacttcggcatgcaaagcaggatcaaccttcacggcataattttcaaccaatgtacgggcaccttcaaaatcaccggtcgatttgattcgctgaatttcagccagcagttcaccgaacaactgacggactttctcataatcattgactacgacataggtctttccgtccttcttcaccatttcgaccactttgtcgggagctcctttttcaaatacccagcgggcaatcaactgacggttgcgcatatgagcttcttcgatattatttcccggttcgatacgtacaagttgtgtcatcagaccattcatcaggaaagtataatattcagctttataagcctctgcatccggaacaagtttcagttctaccagtttcgggtcagccacgtagtacaatccgaacaagtcggcacgtgcttcttcaatagtagaaccatacgctttcaaagcgtcagggtctactcccggaagcaatttaccagaaccatgtcccagacattcgtgcaagtctgtatgaagttcacctgtcaagtcgccatattggtcgatccgctgtctctcttcgttattgcagacaaactcttcattgaacccgttaccgtgggcagctttattataagcatctgtgatattgccgatagtaactgacttggagccgtgatgggcacgaatccagttagcgttcggaagattgataccgatggcagttgcaggatacaagtcaccggcaagaatagcggcagtgatcaccttggcagataccccttttaccttttcctttttgaaagatttatcaaccggcgaatgatcttcgaaccattgcgcattgctgctgataatctctgtacggtgtgtagcatccaagtctttgaagttgaccagtgattcccagctggctttcactcccagcgggtcgccgtagctttctgtaaagccattcacaaagtcaattcttgaatcaaggtctttcacccaaaggatagcatattcatcgaagtctttcaggctgcctgtttcgtagaattgaatcagtttgctgatcacagctttctgtgcatcattttcggcaaccgtttccgctttcttcaaccagtacacaatcttttcaatcgcctgagtataaagtccgcctaccttccagactttttcctgtatttttccatcttctttcaccaatcggctgttgagtccgtaagaaaccggagtttcatctttcgggtctttcattgctccgtagaagctttccgcttcctgctgagtgactccgtcgtaataattgcaggcagaagtcagcaccaagtcttcaccgtccgcctgatttacacgctttgccaggatagccggatcgaacataaccgggaagagctcatcacagagttgttcggcagtctgtccttctgataacggaagtaattgggcgtctgttccgagcactgcctgtttcaagaagtcctgcgagaaaccgggcacaaacttttccatgccgtaatgatgatgaataccattggagaaccatacccgtttgaggtacacttccatatttttgaagtcgggagccgacttgtctcccttataattggtgtaaacggcttcgagcatccggcggattctcaggttatattttccgttctgatcaaacaggatgtcgcgtccttccagcgcagcctgagtcaggtaataaaccagttctttctgtttcagcgtcaaggtttcgaattcgggaaccttgtaccgcaatatttgtaagtctgcaaattgttccactgtataatcaaatttatctgcctcggcagttgttgttttggccccaccgcaagatgcaaagatcgtagcggtaactgccatcgaaataaaatgttttttcataattactgatattgattaattaaataagaaaaggaattatccccgaacttttcattcagaggtaattccttttggtcagtatcggaaaacgcaattacttcttactttcagcgtgtttcttgcgatatccgttaggagtttcacctacgttcttgtaaaatgcagcgtaaaaagattgacgatttgcaaagccaaccattgcactgatttcttccacattcttgtcggcataacgcttgtctgtcaacaaatgcagagcgtctttcactctgtactcattcaacaaacaagagtagttcataccaaaacgagaattcactactgcagaaaggtagcgagtattggtcttcaactctttagctaaatctttagctgaatagtcaggatctttatacttcttctgaactactacaatgttcagaatcttgtcatacaactcgtctgccagttccggtctgattaatgaccgatatgcagccttcttttctttcttttccctcagattgtagggacgtttctttggagcttcctccgcttttttgttctctaaatcactcattgaattaactggttagggtttgtttatttgttattaattgctcattcgcaacgttacatgttacaaatgtcttactttttttttaaacacacaattattttgtgcattttttttctaataaaacaatcaaaaaccttgaaaaagaggaattaagggtgaataataagaaactttaactcttggagcatttaaatcaaaacataaatcgagacatgataaagattgctaaagaaaagcgtacctttgccacaaagtttaaacaaatgttgatgaaagaaactctaaaatcatatttcggttatgacagcttccggtccttacaggaagaaatcatccgccacctgctgaacaagcaggattcactggtactgatgcccactggcggaggtaaatcgatctgttatcaactgcctgcattgctctccgaaggtacagctatagtggtctccccgcttatctcactgatgaaagaccaggtagaaacgttgcaagccaacggcatcgcagcaggagcactcaacagcagcaatgacgaaacggaaaatgccaatctccgccgtgcctgcatcgaaggacgcctgaaactgctttatatttcaccggagaagttgatagcggaaaaggactatctgttgcgggatatgagtatttcgctcttcgctattgacgaagcccactgtatttcccaatggggacatgacttccgtccggaatatacacaaatgggaatgctccatcagcagtttccgcaggttccgattattgcattaacggcaacagccgacaaaataacccgtgaggatataatccgacagttgcatctgatacagccccggacgtttatttcttctttcgaccgtcccaacatcagtctggacgtaaaacgcggttttcaggcaaaagagaaaaataaagcgattctggagtttatccaccgccacagagaagaaagtggaatcatttattgtatgagccgtaataaaacggaaactgtagcacaaatgctgcaaaagcagggaatccgatgcggtgtttatcatgccggattgtctccgcagcatcgggacgagactcagaatgacttcattaatgaccgtattcaggtagtatgcgccaccattgcttttggtatgggaattgacaaatcgaatgtccgatgggttattcattataatcttcctaaaagtattgaaagtttttatcaggaaatcgggcgtgccggacgggatggcttgccaagcgacactgtattattctattcactgggcgatctgatcctgttaactaaattcgccacagaaagcaaccaacagacgatcaatctggaaaagttgcaacgtatgcagcaatacgccgaagcggacatctgccgcagaagaattctgctgagctatttcggagaaacctcaacagaagactgcggcaactgtgatgtctgtaaaaaccctccacaacgctttgacggtacagtcatcgtacaaaaagcgttgagcgccatcgctcgtgcagaacaacaaataagtacagggatattaattgatattcttcgtggaagttattcggcagaagttacggcaaaaggatatcaggaattaaagacgtttggagcagggcgagacataccacctcgtgactggcaggattatttactccaaatgctacaactgggctatttcgaaattgcctacaatgaaaataaccatctcaagatcactccaagcggaagtgacattctttttggaaaagcgaaagcaatgctcgccgtgattcatcgggaagaaatcgtcacaggaaaagggaaaaaaaagaaggtggtcatcgccaaagaacttcctttcggtatccccggtggagaaaacgaagatttattcgaagcactacggggattgcggaaacagattgccgatcaggatggtcttccggcatatatcgttctatcggataaggtgttgcatctgctcagcatttcacggccgactaccatcgaagcattcggagaaatcagtggtatcggagagtttaagaagaagaaatatggaaaagagtttgtgaatctgattaagcagtttgtataataatgtattaagctgccccccctatcgatttacctttaataaagagtaacttattcaagcgtaatcagaaaggactatataataagatgagtaaacaaaaagggaagcaatcgcttcccttttttgtttaattcaagaacatccgatccatttagcctataatccatttactgcccggtatgaacgagataatctttgtcgttatataacagcagacaaatgtagtcactgcgatacatgggatggcggcaacagtaggcagttccagcgtatttttgaatactgtcgcccataatccgagccagaatatatgcataagatacataccataactaagtttcgacatatctgttacgaaacgtggagcttccggccggtttatacaagtgaagagaaggaatgtacccgctgtaagaagtacacagttaatcgtacagaaagcccatcctatttctatgacaggggtagaatgagtaattccgggaatagcctgtatatagaatgagtaaatagtcaacgcagccccggcaaccattgaaatgagtcctacaatgaaacgtttggaacgatcccattttaagtgtacacgtatgtagtgtgccaacacaagatatccaagataacctgagaaataccacaacatatggtattcgttccaaaaacactgcccccacacttcaccaaaccagcgattgaagtacggcatacacgttgataacaggaacagtcctatgaagaaacgttcttcttttgcagtggctttactcaaccaaggagatataataggtataaacaggtaaagacttatcaggggatacatgaaccaaaggtgtccggcaagcgtcgggaagttcagcaatattcgagacatatcctttattgatgtttcgctatctatctgtccccacaacatcggtaggatactatagagtatcataaatatgaaaaacggtggcaggatatgagtgaagcgtcggcggtagaactgccatgaagtctgtccctccttcatcggtaccagcagataagcagagacaatcataaacaatggtactgccatgcgtgagaaaccgtcgtacacggccacccacaatcggtctgcttcactggctaaaaaagattgcggtcccgccatgtccgtagatccggcagcaccataaaagttttcactggcgtgtaccaccataacgaggaaacatgcgaacacgcgcacgtaatctaaaaaaacaatacgtttcattttctgtttgggtattagttagtagtaatatgttttaagttttgtcttttatttacattgtttcagctgctcgtgcaaatcagcaggaggtatgcccaacgaaatagctttttcaaagtccattttagccaatgctttctttttctgtgtcagataaatattaccacgcaacaaataggcatccgccgaagaaggattcagacgaatagcttcctccaaatcgaccaaagccagatcttcatgcttcatctcccgttccacatctgcacgggcaatgtaaagagtcgcgtcttcgggagttgccgtaatcatcttattaagaatttcgagcgcttccttgaattttccttctttctgttccaaggtagccagcccaagccgaccgctataactttgcgggtcaatctccaacaagcgattataatcgattcgtgccgcggggtaatccctccggagcacatagatatatgcccgcatcaacagcgcttctttattctgtttatcttcgtcaagtacctgacaataatcggtataagcacggtctgtattccccatttccagattaatcgcagctcggtccagcagaataggtactgccaatggagcaaagttcagcgcaaaagaataagattcgagtgccttgtcatattcacccaaccgacgctgtaccaatcccagattggaaaaaagcatagcattctttgcattcttcggctccagtttcaaagcctgaagcagtagttcttcggctttggaaagactgtccatttcgatatattcaattgccttttctgataattgctgataggtctgcgcacatagggcaaccggaaagctaagaaataaaattaaaataattcttatcatgattcaaatattaatccaaaggataggcatcaaaagcgaacaactcggtcgacagatagcgttctcccgtatcaggtaacaacgcaacgatttttttgttcctgaactccggacgctgtgccaactgtcgggctgcatatacggccgctcccgaagagattccagccagcaaaccttctgttgcagccaattcccgccccgcacgaatggcttcgtcatcgggcacaccgatcacttcatccactacagaaacatcataaagtttcggaataaaattcgccccgattccctgtatgcggtgtgatgctgcctgacctcctgccaatatgggagacgacgcaggttcaaccgcaacgatatgaacatccggattatgtttttttaaggcgcgtgccacgccgcaaatcgtacctccggttcctactccggcaacgaacactgccacttcaccatccgtatcccgccagatttcttctcctgttgtccgctcatggatagcagcgttcgaaggattttcaaactgttgcaggatcacagatccgggaatactatcacgcaactcctgcgctttggcaatagaagcagccatcccgcccaaaccatctgtcagcacaatctgcgcccccagtgctttcaacaggtttcgccgttccagactcatcgtttcgggcatagtcaatatcaggtgataccctttaatggtcgctaccatcgccagtccgactcccgtatttccgctggtcggttcgataatggtggcaccgggtttcagtgccccgcaggcctccgcatcttcaatcatagaaagagcgactctgtcttttacgcttcccgccggattaaaagcttccagtttagcgataatattctgattaagaccatactttccactatatccggaaagttccattagaggtgtattacccactaaatctgttaatttattcgcaatttttgccatcattcacctcgttttatcaggttgatgcgcaaagatacagaaaagaattgtacctttgtctccgttcaatatttttaagtttatagatatgaaaaagagaatcctgcaatttctcacgacttattttttgttcgttcttctgtttgtccttcaaaaacctattttcatggcttactaccatgaactctatacagacgcctcaatcggcgattatttcagcgtgatgtggcacggcttgccactggatttctcactggcaggatatctgactgccatcccaggcttcctgcttatcgcttccgcctggacgaaatcttccatactacgccgcatccggcaaggttactttggaatcatcgcttttgtgatgtcctgcatcttcatcatcgatctgggcttatacggtttctggggattccggctggatgccaccccgatcttctatttcttctcatctccgaaagatgccatggcaagcgtcagcttctggttcatattactcggaatcctagctatgctgatctatgcagccatcctctacggtattttctacgccgtactcatccgggagaaagcaccgttgaagataccttatcagcggcagtatgtatctctcgtccttttattgctgacagctgcgctcttcattcctatccgtggcggtttttccgtatcgacaatgaacctgagcaaagtatactatagccaaaaccaacggatgaatcatgcagccatcaatccggcattcagttttatgtattctgctacccatcaaaacaatttcgataagcaatatcggtttatggacccgaaagttgcagatgagctgctgaccgaaatgttggataaacctgtggcagtaacagacagtattccgcaaattctaaatactcaacgcccgaatatcatctttattatcctcgaaagtttttctacacacttaatggaaacgatgggaggacagccgaatgtagcggtgaatatggataaattcggaaaagaaggagtgttattcactaatttttacgcaaatagtttccggacggatcgcggactggcatctattatcagtggttatcccggtcagccgagtaccagcattatgaagtatcccgagaaaacggacggacttccttccattcctcgcagtctgaaaaatgccggatacagtttggaatactattacggaggggatgcagacttcaccaatatgcgctcttatctggtttcatcgggtattgagaagattatctccgagacagattttcctttgtccgaacgtccgggcaaatggggagcgccggatcatacacttttccaacgtttcctgaaagacctcaaggaagagaagcagcaggaacctttctttaaaatcgtgcagacatcaagcagtcacgagccgtttgaagttccgttctaccgattagacgataaagtgctgaatgctttcgcctatactgatagttgcgtaggagattttgtgagacagtataaggagaccccgatgtggaagaatacactgatcgtacttgtaccggatcatttgggagcttatccgcgtccggtagaaaatccgctggaagggcatacaattccgctaatactgatcggaggagccgtgaaagaaccacgagtagtagacacatacgcttcgcagatcgatattgccgctacgctactttctcagctcggattgccgcatgatgactttactttcagcaagaatatctttaatccgtcttctccccacttcgggtatttcacggaaccgacactgtttggcatggtgactgcggaaaatcaattagtgtacaatctggatgccaacaccgtccagatagatgaggggacagagaaaggagccaatctggaaaaaggcaaagccttccttcagaaactatatgatgacctggctaaacgataagatcagacaaatccaccttttaataatacgatttattttatgatagaatttctttcggatatagacacccaactgcttttgttcttcaacggaatacattcgcctttctgggattacttcatgagtgcattcacaggtaaagttatatgggtcccgatgtatgccagtatcttatatatactgctcaagaattttcattggaaagtggcattgtgctatgtgatagcaatcgccctcactatcacgtttgccgatcagatgtgcaatagttttcttcgtccgctggtaggtcgcctgcgtccctccaatccggaaaatccgatagcggatttggtttacatcgtgaatggaagacgaggaggaggattcggttttccttcttgtcatgcagctaattctttcggacttgccatatttctgatttgtttgttccgcaaacgctggttaagcatatttatcgtactttgggcatttaccaactcttatacacgcctgtatctgggattgcattatcccggtgatttagtagcaggagccattatcggtggattcggaggttggctgttctactttatcgcccataagttaacggcacgacttcagtcagacattcctgctcctggaaagggtgccggaatgaaacaaacagaagttatgatctataccggattgctgactttagcaggcattatcatctattccatcgtgcaaagttagtttataacatgggcaaaagaaatatcatccataagttattccacaatctcaaaaagcctgaaggcttttggggaagagtcattctccgggaaatgaacaaacggcacactttgctttccgaatggggaatgtcacatatggtatggaataaggaatggaatgtgctcgacattggttgcggtggcggagccaatcttacacagctgatgcatcgctgtccgcaaggaaaagcatacggcattgacatttctccggaaagtgtccttttcgcacagaagaaaaacaagaaatatctttccacccgctgttttatagaacaaggcacggtagacacgctgccttatacccatgaaatgttcgacgtggtcactgccttcgagacggtttacttttggaacgatcttccgaaagcattcaccgaagtaacacgggtattaaagcgaaacggacatttcctgatttgctgcgaactgaataacccgtcagtcaaaacttggacaaatctgattgacgggatgattattcgttcttgtgatgaattgaaatccatactcttgcagtccggctttatctccattgcttcatataagcatgaaaaagggcctttgtgcatagtagcccggagaatagctgagtaataatcttatcgggctaatacgatttctgaataaggaaatccgccccctggatataatgactcccagctaccttttagtaaatcatatacataaatcagccttccattccgactaccatcaaacaatacataaagctcctgtttcttaaaatcatccgaaacaagtgtggctactgaacacgcagcactagagaatgtggtgaaaggttcatccagcatctttgtagtcgggttccatagtctaaattctgttccatctccctccgttattgtagcaccatttctcttcgatacgatatatccgccaacacgtgtatatttagccgttcccataccttctacaggcttaactatccaaaaagggatcaatgccacagcctctatcggttcgccaacatatatacttttctcttctatattttgcccgttcaagactactggtgaaaaagttccatcgccgttatcagccgaacagagtatatttccatcactcatttgtatacaaggataacgtgacaatgcttcagccttcatcccttcgggcagcagaaaaccataatcaggtttctccggcacatacattctggtatagggcatcacattaactgttttaacaaataaacggtctccgccttgatataccccaaatacagagttagcggtcgctatccccattgttacaagctgatcagctcccggcttttcccaatagttcatagaaagatcataaagtccggtcgtacggcgatcatccttcgtccatactccactaagactccagcttccgggaaggttgactacacaagagaagtcttgattgtctgcaagtcgtactatctctgccgtctgaggcttttcaagattgatgtattcgatagcatgaggacggtgggtattggaacgggaattaatgataccataaagctgaaaatctttgggtgcctgtccatccgccaccgaaatctttcctaaagacatcatttgaccggagcggcgtaacaagatttccgttgtagaagcaggccagtgtccgggagccagaaaagtaatgctcgtagccgtcttttccgttataacaccccgtccccctttagcatatccttcatgcagcacttcgtcttgaagcggccagcgaatatcgaacatgatttcatcattgtcttgaaatcctttcgccattatcgttaccttttcaccgggcttgaatactgttcccgaagcaggcattacaacattggttactaaaatcggttgttcgtccttgtcatcagaactacacgctgcaagcagcaaacccaacagtaagaatagataattttttgtcatagcacttgtgtattaatctgtgcaaatgtactgtttttcattagcaaatatcttactcttttactttttaacagtccgactaggtttttctcccaacggactcattttcttcagtaaaaaaacaaagaaacggaatgaacaaaaaagaggctgaactccatttaaagaatccagcctccatatatcttattcagaagatctgtttaagccttcttgatatagtcaacaatccactgtcctacttcctttgtaccgtatttggcaccatcggccacttgaatttcaggtgtacgtacgttttcatccagtgatgcatcaaccgccttacgaatcagcgcaccttcttccttgcagtcgaagtattcaaataacatagctacagacagaatctgtgccaacgggttcgcaatattcaagcccttcgcctgtggccatgaaccatgaatcggttcgaataccggagtactttcaccggtagaagccgaaggaagcaatcccatagagccgctgataacagaaccttcgtcagtcagaatatccccgaatgtattttcagtcaccatcacgtcaaagaaagctggttcttggatcatcttcatggcagcattatccacaaacatatagtcagttgtcacctccggataattgggagccatttcctgtgcaatctgacgccacagacgggaagaagccagaacatttgccttgtctaccacagtcaggtgctttctgcgtttcattgcatattcaaaagcaactttcaggatacgttcaatttccggacgagtgtagtagtttgtatcgtatgctttatcattatcctgatatttctcaccgaagtacataccgccggtcagctcacggatgcagatgaaatccgcattctcaaccagttccgcacgcaacggagatttatggatcaggcatttgaatgtctgtaccggacgaatattagcaaacaatcccaatttcttacgcattgccagcaatccctgctccggacgaactttcgcagtagggtcattatcaaacttcggatcacctacggccgaaaacaaaacagcatctgcattcttgcaaacctcatatgtttcttccgggaacggatcacctactttatcaatcgcatctgcaccgcagattgcatattcgtaacttactttgtggccaaacttctcgcaaacggcactcattacatctacaccttgtaccgaaatctccggtccgataccgtcgcctgctaatacagcaattttaaaatccatgttacttttctttttatcttttatactactcaaagttaattaatctctgtcatatcggaagcatcaaatgcataccgatgctcttctaatatatgtatattcatttcatcaccaggaacaacctttttttctcctgtattcgttcgaatagtaaaagaaaattcctcagccaataaagtatagtcgtaaccatagcaaccgtaaaagaaagcatttccgttcatatccgcagtaacaggtaatgtctgatcttctaatggttcatactgtcccgatgaataacggtggtatcccataggaacaaaccttggacaagcaagagttactgttgctcccggttctgttatcactcgtaagcaaaaacccgacaagacaagtctctgaggatgccagtccaatgtattcatatcctctctaacttcatagtctgccagggaagccccccatctgccataatttccaactgcatacgtgtctttacgtacaagaggccaagtataagatccccatttatcggaaactttctcaccgggagtataataaacattaatccagcaatttgacacaccgtcgggaatgaccagacgtccgtcattcgttaccatctttagttcaaaatcataagcgggtatatccccgccaactccatgagaagccaccgtccgtttgacacataattgtcgtttggaatccagcttccatttatatactccacccttagtttcagtatatacggcataagttgcaaactggtaatcaataaaatcctctctggattcacccattaaggtacagtttactattacttcatctcccggttgccatcccggtgtattattatcgtcattccccgtacatatattgactttctcccttactctatttgtatattcataaatccacaacggatccagttgcaaatttacatcaacaattcgtccgggatataatccttcgtcaccactctccacatcttcatcactatcacaagcacttacgactatcaataaaagtgctgccattgaaatcattttcacccacctcttttcaatgttcattattattcattttaaagtttaatctggtcttcaatcaacaaacggcacaatttataaaaaatagttcagataatgatgaatcgcaacaaataaaatcaacttattcttcaagtagattcaacatcttcattgttgctttgatggcagcctccgtctggtcggcatcaagtccacgggtacggaacacctgttcgtcatagttccaggtaattactgtctgcacaaacgcatctgtacgtccacccggtgggatagataccgcataattcgtcaacatggggaatttacgtcctaacgtcactttataaattttacgcaacgcacgtacgaaagcatcatactgaccatcgccacttgaactttcttcgtattcctttccgtttatttcgatctttaaagtcgccatcggtttcagaccgtgagccagatttacaaaataactcttcagcttgaccttctcgcctatcgccccgtgtttcaatacatccgatacaatatacggcaaatcctcctgggtcaccaattctttcttgtcccccagttcaatgattcgctccgtcaccttgcgcatggcatcttcatcgagctccagtcccagatcttcgaggttcttacggatatttgcctttccacttgtttttcctaaagcatactcacgtttacgtccgaaacgttcgggaagtaaatcattacaatacaaattattcttattatcgccgtcggcgtgaacgcctgcaacttgtgtaaagacattctctcccacaatcggcttattggcaggaattacaataccggaataggattctactacccgactgacatcattcaggcggctttcgtcaatattggtcattgcattgaaatgatctttcagaatagcctgcacactggaaaggggcgcattaccggcccgttcgccaagtccgttgatcgtagtgtgcaatcctctgacaccactcaacacggcagccagcacattacttaccgccagatcatagtcattatgcgcgtgaaaatcaaaatgggtattcggataacgcttcttcatcttccgcatatattctatcacctgcagcgggttcaggattcccaatgtatcgggcaacatataacgtctgatgcttgtctgcttcaagccatccatcaactgaaacacatattcgggagaatctttcattccgttactccagtcttccagatatacattcactccgatatcctgttcatctgcgtaatgtactacgttgataatatctgcgatatgttcttcgggagtctttttcaattgttgggtacaatgtttcaatgaccccttacaaagaagattgatgacacggcacccggtacgttgtatccagtccaccgaagtatgaccgtccacaaatcccagcacttccactttctgaagcagattgcggcgggctgcccaatcacaaatcatcttcacggcttcaaactcaccttccgatacacgtgctgaagcaacctctacccggtctaccttcaaatcctccaatagtaaacgggcaatcattagtttctcatggggcacaaaagatactccgctggtttgttcaccgtcacggagcgttgtgtccatgatctctattttgacgccttgttttcccattcttctattttatttttattgcttagcaagaagtctatgtcatccaatccgttcatcagacaaagtttcttataagcgttgatttcaaaatgttcactcttacccgttgctttattagtgatggtctgttcgggaaggttcacttccacttccatcttcggatcggcaaagatcgagtcaaagagttcctgcaaaaatccttcagtaacaactaccggaagtacgaagttgttcagctcattatttttgtgaatatcggcaaagaagctcgatactaccacacggaaaccatatccggcaatcgcccaggctgcgtgttcgcggctggaacccgaaccgaagttctttcctgccaccaatatctgtccgctatatgtaggatcgttcagcacaaaatctttgttcaaggaaccatcggcattataacgccagtcacgaaacaggttatcaccgaaaaacttctcttcacgagtcgttgctttcagaaaacgtgccggaataatctggtcagtatctacattctctaaaggaaggggtacacaagtacttgttattatattaaattttgtcttagccatctttctgtttacaatttaaatatttacaaattacgattgaaattacatcagttcacgcgggtcggtaatcactcctgtcaccgcagcggcagcagcaaccaacgggctggccagtaaagtacgggcacccggtccctgacgaccttcaaagttacggttgctggtcgatactgaatattttcctgcaggaatcttgtcatcattcatcgcaaggcatgctgaacatcccggttgacggattgcaaatcccgcttcagtcaatatcttgtcaattccttccttacgaatctgtgcatcaaccatccatgatcccggaaccagccatgcgattacattatccgctttcctgcgtcccttcactagagaagcgaatgcgcggaagtcctcaatacggccattagtacaagcacccagaaatacgtaatcaatctttttacccagtaacgattcacccggctggaatcccatatattccatcgattttttgaaagaaacctgtgcagcctctcccattccttccgtagtaggaatgttttgcgtaattcccattcccatgcccggattggttccgtacgtaatcatcggctcgatatccgctgcatcaaaacggacctcctgatcgaatacggcgtcatcatcgctcttcagcgttttccagtatttcatagcctgatcccatgcttccccttgcggagcattctcacgtcctttgatatattcgaaagtcacttcgtccggggcaaccataccaccacgtgctcccatttcaatggacagattacaaagagtaagacgtccttccatagtcagattgcggatggccgaacctgcatattccacgaagtaaccggtagctccgctggtagtcatcttagacatcatgtacagagcgacatctttcgcagtcactcctttacccagttcgccatctacggtaattcgcattgttttcggtcttgactgaaggatacattgtgaagccagtaccatttccacttcactggtaccgatgccgaaagcgatagctcccattgcaccgtgagtagaagtatgcgagtcaccgcaaacaatcgtcatgcccggcagtgtcagtgcacgttccggacctaccacatggataattccgtttttaggatgcatcataccgaaatgggtcagaccgaaatctttcgcatttttcgtcagtgtatccacctgagtcttggagatcgggtcttcaatcggtttatcctgatcatgtgtcggagtattatggtcgggcatacagaataccttttccggacgcaataccttgatgccacgctcgcgcaatccggcaaaagcctgcggactggtcacttcatgacaatataaacgatcaatataaagttgtgtcggcccatcttccaccgtagtcaccacgtgggcatcccatattttatcaaataatgtattcatctgttatatctatttttactatgtatgatttataattaatgcagggtacgtatttcagtaccactttcgctgttcctttatgccttgaatttattaatacagtcaatataagcttctaccgatgcggctataatatccgtatttgctccgaagccataataaatctgattatcatattccacctgcatatgaaccttacctacatcatcacttcccttgctaatagcctgaatagtgaattctttcaatgtcatgtgacgatctacgatctttttcagagccttgatggcagcatccaccggaccattaccactcgcacaagcttcaaacttctcaccggaaatattcagtcccagactagcaaccgaacgtacaccgacaccacttgtcacctgcaaatactccaacttaatacgatgattctggctgcggtctgctcctgccaataccaatacatcatcatcattgatatcttttttcttatcggccagtttcagaaactcctcatataccttatccagtttttcctgatccaggttaactcccaacaacgacaggcgattcttcaatgccgcacgtccgctacgggcagtcagtacgatagagttatcatcgatgcctacatcatgcggatcgataatctcgtaagtttctacattcttcaacacaccatcctgatggatacccgatgaatgggcaaaagcattgcgacctacgattgctttattcggctggacaggcatattcatcaaactggataccatacggctggtcggataaatcttctgtgtattgatattggtctgaatatcgatctcatgatgactcttgataatcattgcgatttcttcgagagcggtatttccagcacgttcgccgataccgttaatggtcacctctacctgacgggctccattcagaacaccagcaatcgtatttgctgttgccattcccaaatcgttatgacagtgagtagaaagaatcgcgttatcaatgccgtctacatgatcaatcaaatatttaatctttgcaccatattcggaaggcagacagtaacccgttgtatccggtatattcaccactgtggctcccgctttgataaccgcttctaccacacgtgccagatattcattgtcggtacgtcctgcatcctctgcataaaattccacatcatccacaaaacgacgtgcatacttcactgctgctaccgcgcgttcgataatctcttcccgattggagttgaatttatatttaatatgagaatcagaagtaccgatacctgtatggatacgtttatgcttggcgaatttcaaagcgtctaccgctacatcaatatccttctgaacagcacgggtcaaagcacaaatagtgggccaagtcaccgctttagaaatttcaatcacagaattaaaatctcccgggctggagatggggaagccggcttcaattacatcgacccccaaagcttcgagtgccttcgctacctgaatcttctccactgtgttcaactggcatcccggaacctgttcaccatcccgaagggtggtatcaaaaataaataacctattgtccatcttctatcattttatgttattattggctcaaaaaaaaacctttcacacttggaagtgagaaaggctttcgtatattttcagtatacacatttacgcgcagcactcacttccactaacctttgatagtagaataataataccgcatagtagaatatgtataaacatctgattcattttttgtctcttttatagtttgacggtgcaaaggtatggattatttctgtactaccaaataatacgttacttttttatcgaaaataatttcatttcataagttaaagtcggttattagcagaaaagtattactaacaaagccccgtatttcatcaaacagaaaaagggggcatagtgcagacacactatccccccttttaatttatcgttctaaatcaatagattactttttatcacagcattccttcttttctgtgcaatcagctttcttatcgcaagcagtagcacaagagtctttagcctggcagcaagagtcagttgcttcaacagcaacagtttctacagtttcaactgttgcttcttcaccttcagaagcggcagcgttattagctttgttaccagaacaagagatcacagcgaaagaaaatgttactgctacagcagccaaaaaaagttttgttttcataccttttaatttgctttaaacgtttaataaaataattgtcgtcggcaaatatagctattttttcctaaactgccaaaacaagaaatccccgccagtcaataaagactggcggggattctctaaaaatggcggctacctactctcccactgttacgcagtaccatcggcgtgacgaggcttaacttctctgttcggaatgggaagaggtggaaccctcgtgctataaccacctgaatttcttcaattgacaatggacaattgacaaatgacaattatcgcagctgtcatgataagttatgacatgataaaaagtaaaattcaagtatctgttaatctaattgtcaattgtcatttgtcaattgtcaattaaaaaagctaaacgtatatatcgcgatccgcaccgtccgaaagaaagtgaacgggcaattagtaatgctcggctttgatgttaccacctgtacacctgcatcctatcaacgtcatcgtctttaacgaccctaagaaatctaatcttgtggctggcttcgtacttagatgctttcagcacttatccaatcccgacttagatacccagcaatgcacctggcggcacaactggtaaaccagcggtcagtccaacacggtcctctcgtactagtgtcagagccacgcaaatttcatacgcccacgatagatagagaccgaactgtctcacgacgttctgaacccagctcgcgtgccactttaatgggcgaacagcccaacccttgggaccttctccagccccaggatgtgacgagccgacatcgaggtgccaaacccctccgtcgatatgagctcttgggagggatcagcctgttatccccggagtaccttttatcctttgagcgatgtcccttccatacggaaacaccggatcactatgctctagtttcctacctgatcgacttgttagtctcccagtcaagcgcccttatgccattacactctacggacggttaccaatcgtcctgagggcacctttagaagcctccgttactattttggaggcgaccaccccagtcaaactacccaccaaacagtgtcctcgtaccacgagttagaactcaaataatcaaagggccgtatttcaacagcgactccacaaatactggcgtacctgcttcaaagtctccggcctatcctacacatcaattacccaaattcaatgttaagctatagtaaaggttcacggggtcttttcgtcccatcgcgggtaatcggcatcttcaccgatactacaatttcactgagctcacggttgagacagtgtccagatcattacaccattcgtgcaggtcggaacttacccgacaaggaatttcgctaccttaggaccgttatagttacggccgccgtttactggggcttcaattcaatgcttctcttgcgatgacatctcctcttaaccttccagcaccgggcaggtgtcaggctgtatacgtaatctttcaatttggcacagccctgtgtttttgttaaacagttgcctggacctattctctgcgcccaactctcgttgggaccctttatcccgaagttacagggtcaatttgcctagttccttaaccgtgaatcactcaagcgccttagtatattcaacccgactacgtgtgtccgtttgcggtacgggtacctcaaggattaagtttagcggattttcttgggagtatgattacacgcactattggattgttccgaagaacgctccatactatcaggttcgactcttatcccggatttgcctgggataatcagcatctacacccttcaacggactattccgtcagtccgcggcgctgtcacgcctccgtctccacgtcactccttaaggtagtacaggaatattaacctgttctgccatcggcctcaccgttcggctgagccttaggacccgactaaccctgatccgattagcgttgatcaggaaaccttagtctttcggcgagggggtttctcaccccctttatcgttacttatacctacatttgcttttccacacgctccagcaaagctcacgcttcaccttcgacgcagagtggaatgctcccctaccgatcattactgatcccatagcttcggtaaaacacttaatgcccgattattatccacgccaaactcctcgactagtgagctgttacgcactctttaaatgaatggctgcttccaagccaacatcctagctgtcttagcaatctgacttcgttagttcaacttagtgtttatttggggaccttagctgatggtctggattcttctcctttaggacatggaccttagcacccatgccctcactcctgtgatagaactaatgcgcattcggagtttatcaagacttgataggcggtgaagccctcgcatcttatcagtcgctctacctcacattagtaactcacaaggctgcacctaaatgcatttcggggagtacgagctatctccaagtttgattagcctttcacccccaccctcagttcatccggaagcttttcaacgcttatcggttcggtcctccagttagtgttacctaaccttcaacctgaccaagggtagatcacttggtttcgcgtctactccttccgactcgacgccctgttcagactcgctttcgcttcggctgcgcatctcaagatgcttaaccttgccggaaaaagtaactcgtaggttcattatgcaaaaggcacgccgtcactgcttacgcagctccgaccgcttgtaggcgcacggtttcagggactatttcactcttctattcgaagtgcttttcacctttccttcacagtactggttcgctatcggtctctcgggagtatttagccttaccggatggtcccggcagattcacgcaagatttctcgtgtcccgcgctactcaggataccactacgcttaatttgacttcgtataccggactatcaccgtctatggttccactttccagaggattctactcgtcaaatgtcttgcgacatcgtggtcctacaaccccacacatgccgtaacatgggtggtttgggctattccccgttcgctcgccactactaggggaatcattattattttcttttcctacaggtactaagatgtttcagttccctgcgttagcttccatcaaagatggatgacattccttcagaatgccgggttgtcccattcggaaatctctggatcaaaggttatttgcacctacccagagcttatcgcagcttatcacgtccttcatcgcctccgagagccaaggcatccgccatgcgcccttgcttactttctttcaaacttacctttaagtatcaggtatcaagtatcaggtattaaacccgggtactcaatatcgcggtacttaaaacgtacggttcgatatatacttttagctctttactaaattttactttttgtacatcatgtcaaagatcgtttctctgttttcagagatggtggagaataacggattcgaaccgttgaccctctgcgtgcaaggcagatgctctagccagctgagctaatcccccaagagtaattgaacatcgcaataacgtattggcaacgacaatttttgttcggagtagtcccaggcagagttgaactgccgacctctacattatcagtgtagcgctctaaccaactgagctataggactagttcaaccttgtctacctgatgttagactcggcttctttatttctcttgtttatctctatctatacttctatagatggttgatctatatgttataaataaacaagtaccagtagtacaataatagaacctatgaaatcgttgttacgacatcgctccagaaaggaggtgttccagccgcaccttccggtacggctaccttgttacgacttagccccaattaccagttttaccctaggacgctccttgcggttacgtacttcaggtacccccggctttcatggcttgacgggcggtgtgtacaaggcccgggaacgtattcaccgcgccatggctgatgcgcgattactagcgaatccagcttcacgaagtcgggttgcagacttcgatccgaactgagagaggcttttgggattagcatcctgtcaccaggtagctgccttctgtaccccccattgtaacacgtgtgtagccccggacgtaagggccgtgctgatttgacgtcatccccaccttcctcacatcttacgacggcagtctctctagagtcctcagcatgacctgttagtaactaaagataagggttgcgctcgttatggcacttaagccgacacctcacggcacgagctgacgacaaccatgcagcaccttcacatttgccttacggctatactgtttccaatatattcaaatgcaatttaagcccgggtaaggttcctcgcgtatcatcgaattaaaccacatgttcctccgcttgtgcgggcccccgtcaattcctttgagtttcaccgttgccggcgtactccccaggtggaatacttaatgctttcgcttggccgcttactgtatatcgcaaacagcgagtattcatcgtttactgtgtggactaccagggtatctaatcctgtttgatacccacactttcgagcatcagtgtcagttgcagtccagtgagctgccttcgcaatcggagttcttcgtgatatctaagcatttcaccgctacaccacgaattccgcccacctctactgtactcaagacagccagtatcaactgcaattttacggttgagccgcaaactttcacaactgacttaactgtccacctacgctccctttaaacccaataaatccggataacgctcggatcctccgtattaccgcggctgctggcacggagttagccgatccttattcatatggtacatacaaaattccacacgtggaaaactttattcccatataaaagaagtttacaacccatagggcagtcatccttcacgctacttggctggttcaggcctgcgcccattgaccaatattcctcactgctgcctcccgtaggagtttggaccgtgtctcagttccaatgtgggggaccttcctctcagaacccctatccatcgaaggtttggtgagccgttacctcaccaactgcctaatggaacgcatccccatcgataaccgaaattctttaataacaagaccatgcggtctaattataccatcgggtattaatctttctttcgaaaggctatccccgagttatcggcaggttggatacgtgttactcacccgtgcgccggtcgccatctccagtttgcaagcaaactgaaatgctgcccctcgacttgcatgtgttaagcctgtagctagcgttcatcctgagccaggatcaaactcttcattgtaaaagtattgttaatcagcattgctgctggttcttgctctgttcaggatgccgtacaatttattgacttcattaataccttacgtctcacacatatttatatatatataagacaagtattgacggttctattttttcttgtactacttgtattgtttatcaatatttcaaagaacttgctgctttcgttttaaaagcgggtgcaaaggtaagaggttttattttaactaccaaatgttttcggaagtttttttttcgcttttctttttctatcgtttctcagactctcttagcgaaagggaaagaaggtaaagaagaaaaacaaaacgacttttctttgcgaatcggactgcaaagataagaacttttagctttatcttccaaactttatcggaagtttttttgttcttatggttaagcagacccttgcttttacactaagtcaatttatcaaggctttcttctcttggaaagcgggtgcaaaagtagtcccttttcaaatatactccaaacttaaatcactctttttttgaattatttttgaggatagaagctaaagtgttgaattataaggatgttgtagaacatatttttctcggatacaggaggaaaggcggaaaggggtacaccttattatattcacacgcgcgttagaagggcgaggacacgggcgtatgcacaagggaaaggaagaggaaatacaggaaaggtgaagaagatgcacaaaggaaaccagaacgggaatccaaagaaaagaaaaaaaggacggaggaaaaggggattgaaagactgaaaaggaagaaggcaggaagaaggggaaatcgtagcaagggaggaaaatacgaaaaaagggtagagacaggagtcttttaaagttctacactcttggaaaaagaaaaaaactctgccatccgcaacaattcgattaacattcttagggggactgactaaaaagtcaatagtatcttaaatatcctccttcccgaaggaggagaatggagatactgccgacttttcagtcaacccctacttacgtgtcagccaggctctctatgaaaataaaaactataatttgctgtcatctgtcacggtgtcgggtgtaattgattgaatatgaataattaatgaggtggtggcagtaggtgacggcagtgtgacggcaaattttgctgtcacactgccttgttttcaatggttacttatgggctgttggttggtctatacagagctttttagtttctcccgcttgaaacttttgtttctcctgcttggaactaaagtttcatcggcttgaaactttagtttcaaagccgtgaaaccaaagtttcggacgcttgaaaacagtggttccagccgatggaatgaatgaaacaaggcaggaaactgatcccttacttatatgattcaattaacttgaccgcaccaactgttcgattaacctgctcttccaagaaacaataaatcatttatcactcaaaaacagcggagttatcaactattaaaggatgatttatcaattattaatgtctgaaatatcaatcgttaagaattgacacctcagacattaatacactgtaaatcaaatgacaacatcaaacaaatgacagttaatgatacatggaagagtgagagcaaacacttgctctcatacctgctaccacaattgctgccatacctgaaactacgatgaataaaggcatacagacaatctgttagggcatgagagcaaaaacgcattcaaattacgtggggagcctgattatctctaggagaataatatgctagaccaagaatcagtttacaacacaaaaagtgacggcaaaaagcgtaaaactcttgccgtcacttagccatcagcatttgccgtcaccgctattggtctatatattaatactttattctaaaaagtgacgggtgacgataaaaaacatagtttcaactctaaaataattattttatcttaagggcaaaacctcctcccggtgccagatgaactttcagtttaccgtccttctttatcgggaaggactcacacttataatcacgacctgcccgatgagcattcacaccatctttaaacaaagtagcatgataagatttatcacccaggaaagaacaatcgacttcaatatcacgtgcactccaatctgtaattccacctacataccagacatcccctttccggcgtgctgtcacaatatactctcccattttaccgtcaagaacgatactttcatcccatacagttggtatttctgcgataaatgccgttgattccggttcgcgcatatagttgctcggagtatcgcacaacatattaaaaggagattcaaacaccacgtacaaggctagttggcggcaacgggttccctgactcatcggttctgaataacaaggataatagttacccttggaagcattcctcatcgccccctgcgtataatccatcggaccggaaacctgacggatgaaaggaatcatcacatcatacttcacctgatctactgacggtgaactccatttcatctgctccaacccattgactccttcgaaattcaacacattcggataagtacggttcaatccggcaggcttatgagtgccgtgcaggtcaagaatcagcttgtatttagcacacatttcagcggcacgatagttgaatgcagtcatttcctgatcgtcacggtccataaagtccactttgaaaccctttactcccatttcggcataatgacggcacacattttccatatcacgctcgaatgcatgataaccggcccaaaggatgatacctacatttttggaagctgcgtaatctaccagttctttcaggtcaatctccttgacaacctgcatcaaatccgcctgtaagttcactgcccatccctcgtcaagtatcacatactcgataccgtttgcagaagcaaagtctatatatgccttataagtcggattatttactccggtcacaaaatcaacgccatccagattccagtcattccaccagtcccaagcaacctttcccggtttaatccatgaaatatcggacatacgtgaaggcgcacctaacaggtagctgagattggtagcggcaaggtccttatcggtggtagtaaccacggctatacgccaggggaagtttctcggcttatccactttggcaatgtagtcttcatgctccttcaccaacatctgaagctggttgtgacccccctgtaccgtacgcttcggataaggagcatgcatactgctcagacgattcgcgccttccgaagcagaaagataaagtcccggataattttccagatcggactctgtgatacagactttcactccatcgcccgcatctactaccaacggcaagaacatcaagcgctgtttattcagcttcgacagtttgtccgttgtatacgtattctcgaaagaattaaaaaactgggagttataatcaccgtctttaccgctttttacataaggcacggaggcagtcatatccgatggaaaacaataatcagatacttccgtcaccacatgaaaaggcttcttcccctgattcacaaaacggtaggcgataccgtcattgtatgcacgaaactctacattccagtcttttttgaaacgcaaggtcagtccattataatgatttctcaattcgctggcacggtagaaaggagatggtatcatctcgtccacactcttcctggaagttccggataattttgcattttctccccagacagtcccgttatccaacgtcattgatatgggagaaggagtcagaatctgcctgccgttgcatgtaatgtcataagtcagccggtcgccaatggttattgtcgttttcagatttccatcaggtgaggctagtgtaaattgcttctgagcttgcaacgaaagcgtacacaagacacataataataaaaatgtaagttttttcatggttgtaactaatatattagatttcaaaataattattccgcaataaagcgctttgtctgtacatcacgactgttcgtacctatcatcacgtcaaactctcccggttcgtagatatattgcagcccggaattataaaatttcaggtcatcttccgtaagtacaaacttcacttcacggctttctccttttttcaggaagatacgatcgaagcctttcagctctttcaccggacgcgctacttccgcatagatatcacgcaaatagatttgtaccgtttcatagccgtcatggttccctttgttggtgacggtaacggaagctgtcaggtttccatttttcggcaaggtttccgaactgagctgcaggtcgccatatacaaagtcggtataactcaaaccgtatccgaaaggataaagaggttcgttactctcatccagatagttgctggcataccggttgaaaacacggttgtccgggtccggacgtccagtgttcaaatgattgtagaacaaaggaagttgccctaccgaacgagggaaggtagtagtcagcttgccgcacgggacggctttgccaaacagaacatcggcaacggcatcccctgtctcactacctccgaaccatacattcagaatagaaggaatgtgttcgctttcccagttcaagatcaaaggacgaccggtgaacaggagcagtaccacaggcttacctgttttcaccaatgctttcaataagtcctgctgagcgtcagggatttccagattagtacgggaaggagattcaccactcatttccgcacattcacccacagcagccacaatcacatcggcacgggcagccgtacgcaatgcctcggccagcagttgctgatcattaccacgttccaacggacggatgccgacagctcctttttccatttccgcatcataatatacattgctgcctttggcataaagtatttcagccttgtctcctactgccgaccggattccttcgagtaatgtaccatgtctggacggagtacaggtcatgctccacattccgcacatattattgcgtgcatctgccatcggacctattaatgcaattttccctttttcctccaacggaagcaggtgattctcatttttcagtagaacaaacgtctctgccgcaacctcgcgtgcaactgcacgatgctcaggcgtataaagttctttttccgcacgtaacgtatcgcaatatttatatggatcggcaaacaagcccagtttatacttagcctccagcacacgacggcaagctgcatcaatctgtgcttcggtgactttcccctctttcagcgattcttccaacgtattgagaaagccgcaggaaaccatgtccatatccgtccccgcctgcaaagcacggacagaggcttccttcaaaggagccacaccatgaatggacatttcagcaatggaattgtagtctgtgaccaaaagtccctgaaatccccattcgtcacgaagcacgtctgtcaacagccatttatttgccgtagccggtatgccgtctactatattaaaagaactcatcacactaccgacaccagcctcaaccgccgcccgataaggagcaaaatattcgttatacatacgcagatggctcatgtcgactgtattataatccttaccggcttctgatgctccatagagggcgaaatgttttacacaagaaaggatttcatcttttccctgcatactgtcaccttgataaccgtgcacataggcctttgccaacagtgaacccagataagggtcctcaccgcttccttcggcaatacgtccccaacgggcatcccggcagatatctaccatcgggctgaatgtccagcaaatgccatccgcactggcttcaatggcagaaatccgcgccatccgctgaatagccaacgtatcccaactgcatgagagggccaacggtatcgggaaaatcgtttcataaccatgtatgacgtccgccccgactatcaagggaattttcaatcgggtttcttccactgccagccgttgcaggtcatagatttttttgattccttttacattgaaaaagccaccgatctcttctttgcgaatcatatcactaagttcactattcatcaccgagcctgtcaccaagtcgccaccggaaggaaggttcaactgtcccagcttctcacggatcgtcattttacccatcaggtctgtgacaaagcgatccatctctacctcttttcccccaccagactccgaacaggaaaagaatataatgccacaaatggcaccaaacaccagatttcttattttcataagctcttcaaattatttatttacttttctgactttaccttctatacaataacggcaacatcggtcaacagaatctatttcgccaaagttaacacttccttctaaataatgagacatatacccgcaaaatagattatttatttctgtcaactgaatctatatacaatagacggttcagaaagaaaaagccacattaattcagagctacaaattttccatccttaatataaataggtgttatcaccggatgttccgtctgcgaattcggtgcatgataagaaatcatcagcctgcctttaagatccttgaataccatcgcgtgtccgctatcgtcactatttaacgtttcgggctcctgcacccaaggaccaagcacatcacctgatgccgagacagcctgcccgatagcatattttccatctgtctttcggaaactggaccatagcataatcagttttccatcatccagacgatagataaaaggagcatccgtaacattgcctgtcaccccagaacttgtaatagagcctacccagggagcttccgaagccttgaacaacagatacggatcaccttctgtcgttttcagatctttcgccagccgttgggcataaatttcaccgtcgatggtctccagccactcacgacagaacaacagccagggatttccttctttgtcaatatacaaagatccatccagacacatccagccggaaggagtaatcgccttgtttacaagtggagtgaaagggcctttcggactatcggaaactagaatagaagttccccgcttcactcccgcattactgaaagtagcaaataaataataacgtccttcatattcatacacatccggtgcccaaaaatcctgttgcccccagaaatcagttttagctataaaagaatatccttcgtctttccacgtggacaggtctttacttttataaactctgattttcaagttattattgaaatgaagataatacatcgaagttttcttgtcgaccagaataaacgggtcccgcaaacgcaaactcgatacaggaatcgtgaaactttctccccctacttcatccggatcggtggaggaagtctgtccatcatcattactacaactgacaatacacgctcccatcaataacaagagcgaaagaatagaatgctttaactttttcatatatcaatgattatttaataaaatacctattgaaaactgataaataaattgttcaagatcaataatgaggattctgctcgatatgagaattttcaataataaccgatgtaggaatcgggaacaaaagattcttctctgagaaattagtactatacttcttaccggtttctacatatttccccatccggatcaaatcttccctgcgctttccttcataccagaactcccagcctctttctttcagaatccagtctctcaacgactccttatccgggaaatcggataattgctttatgatagcgtctccaccatcagcagcctgttccattgctgtaaactcgatttcatcaatccaaagttcatatccgcttccggaatttcccaaagcaaggaacagagcacaattttgatcttccgtagctttacctgtctgtgtggagaattcctttacttcgcctgctttcaaagagatggattccatgtggctcaatggtccttcaacgcgtatttcaaactgaatgtctttcgaggctttcagcttcatctttattgaatacttacgcccttttgcaaccaaaggttctgttcgcatctgcaaagtccagaattctgtacccgaagattcaacttccacatgtaagctgtttccgttattcaacgtgttgtttttatccacatcatacttccaggcagatccaccggcctgatcgtagttattcatcgagaatatccctataacattgtcaacaaactctccgtcaaagctctctttaaaaacgggtattgcaggcagcgaggtgccaaagccaaaagcacgtttccggatatcattaatcagatcgacactcccttgattaggaccattcagttcattcaatgcttccgccttaaataacaacacttctgcatatcggtcgagtaccttgtcattgcctgcccatgtgcctgtagcttcaggatcaatcccatatttcaaaggcaaagcacctacatcaccactggctctcaaatcaactgtagcaccggactttgatgtatattcggcctgtgccaaagctcttcgccggtcattttcatcaaacgtatcatagaattcccacggcatccggtgtccggaccatccttctacgatgtttccataaggtgaagcgtagtcacccggcaaaatatttgcatatgtatgattaccataatctgccagtggttcagctctcacaacaaacatcagttctttattaccttcgttctgagctgaaaatatacttgcataatccttctccagttcatagtaattcagaccgataatctcatttgccgtttcgagagcattctgccactgcttttcatgcatataatatttcagtaaataatgcagggcagctccctttgtgatacgtccgtattcagcttgttctaccggaagtgcgtcggcagcagcacgtagttctgtcgtcaggaaagttccgacttcttcagacgtaggtctgtaaggtttataatccgggtccggattgattgcctggtcggcttccagaatcattggcataggaccataaagccgatataaatcgaacatgaaaaaggctctgagcgcccggacctccgcaatatacaagtctttcaccgactgagctaccggagactcttccatcttcgctatcgtataagtgcaacgggtgatattaggggcagtccagttatagaatcctttcaccatctggtcagcatccgtccacgaaccattcagaaaagcaacccatgaccacttggtagtccattcttcggttgaaacttcatccattacaaaagaacttccatcacaaaacaaataaggtccccagcctttttggcgtaattcataataaagggcaaccgttgcagccgaaaggtctgcaggagtattaaacgcattcccagtatctacaactccatacaagtgaggttccaagctcccctcacaggctacaaactgaatgcttataaatagtaataatagttttttagctaatttcttcatgacattccagtttaaaatttcacatcaagtccaaatgaaaaagtcttctgttgaggatatgacgcccggtcgttttcaacttccggatcgagtcctttatatccggtaaacgtcagcagattctgaccggaaaagtaaaatcttactttcaacttatcagctttaaacagtctgctcaaatcatatcccaacgttacgttcttcagacgtaaatatgtattcttctcccagttcggagcaccgtagctatcatagctgttcacttcgccactaggcatagcagaactcatgttgtcggaagtccaacgattttttatatccgccaaaaagttattattgtctttcagcctctggatgccgtttccaccatataccccgtgttctacctgagtgtaaggataggagtatccgccaaccgaagcataaagatagatattcagatcaaatcctttgtaccggaaatcattcgaaaatcccatagtaaacttcggtgcacgtgtccccagatatacgacatctgcctgatctattttcccatcaggctttcctgtcagattcccttcctcgtcgagtccgttcacatctttatatttgcgctgtcccggtaacaagtccggcatagccggcgtatcttcacccgcctgctttataccgtccggaatcagcgtatagatagcacttaccggatcgttttctttgacataaggagccagaattactttcggatcacgttctttccatctgtcacgataggaagtatacgtcaatgtcgattcccaatgtaacggtccttccaggttcactgtattcagcgtcagttcaaaaccggtactttttgtttttccaatgttggaccatataccggtagtgacagctgtatgcggcagcgaacgccagctcagcaggtcttttacctctttaaagaaaacatctacgctaccattgatacgattccggaagaaaccgaaatccagtccgaagttaacttctgtagtcgtttcccactttaaatcaggattaccgaactttcccagatttactcctctcttttctgtatctcccagataataatttctgccgtcaaaggcaaagtactcggaagcagcatcgttaggcagattttcattacccacctgtcccatgctgacacgcaacttggcatcggagagccagttgacatctttcagaaaatcttcctgattcattctccacgcaaatgctcccgaaggaaagaaagcataacggttgttctttccaaaacggtcgctaccatcgatacgggcagtaaaagtaaacagatacttgtctttgaaagagtattgggcacgaccaaaataagaagccaacacgtgtttatttttataagaactgaccaccggacgcgtttcacctgcctgtagtttataatacatcaacgcatcagacataaatcccatagcacgtgcatacgctccgtcatcattctgcacctgatacgaatatcccagtaatgcaagaagtttatgtctctccttgaaagtcttctgaaaattgaaaaccatatctgccacatagtcttcacggttggcggaattgatattcgcatctccattcacactacttccatatttcgtagtcatcggatagtagctatggcgggacccgtcgcggatatccgcaccggcagacagtttcaaccagaacacatcttttataaaatagaaattagtgaatgctgttgccagaaaacgcttggtctttgtctcatcctcaatgtcgagataagacaaaggatgattgagcaatgcctgcttaggatcttccatccatttgccggtcgtcaggtctcgttccgccttcactgtcggactataacttaacgccgattcaataatacctgccgtactgtcatatcctccccccagtgtcgcattctgatcgactacataagaggctgtggcagaaataccataatcccaccatttcgttattttatggtccagattataacggaagctatagcgtttataaccggatgttttcaccactcctttctgatcgaagtagttcagcgaaatcaatgatctcatcttttcattaccataagtcactgtgaggttatgttgctggataagacctgtacgggtaatcatatcataccagttggtcccttttccggcttttgctatttcttcatccgtgtacataggcacataagggctgacagcacccggatctgtattcccataaggatataccagattctgcattaaatactgttctttatagtaactgttctgagtagtcattaactctccggccgtcaataattccggtcgtttatttatagtctgaaacgacatattcatgttatactctactttcgtatcctgagtacctctttttgtcgtaatcagaacaactccattagcaccccgcgcaccataaatggcagttgccgaagcgtccttcaaaatctctatggattcgatatcgttagggttaatactgctcaaagggctgttgcttcctgccgtccactgattaccgcttcccggattgacaccggcattcactatggggaaaccatcgaccacatacagcggatcattccccgcaccggtagaagccgcaccccgaatcagaacttcaataccaccaccgggctgtgcactcccctgttttacagtaagtcctgccgcacgtcccatcaacatttcagagaagttcggtgaagctgctttattgagtttctcagactttacagaaacaatcgaagcattcaagtcacttttcttcattgtaccgtatcccactaccacaacttcatccagcaattcttgcttttcatacaaaacgatggataaatctgtctgatttccaactttcacttccaaaggctgatagccgatgtaagacagttccaataccgctcccggtgatacttccaacgtaaacttcgcatttatatccgataccgttccgttagttgtccctttctccttgatggtaacaccgataataggctcgccgttaacatcattcaccacacctgtgatcttacgttttttaccatcctttgaagtattctgcctggcttgtcctttctgaacaattacattcttccctttcacttcatagacaacgtcttgtccgtacaatatctgatcgatagcctcattcagctctttcgcctttacagttataatcttctttgtatccagatctccgactttataaacgaaagaatatccgcttttattcttcaactgggtcattgcttctttcactgaaacgttatccattttcaatgaaacagcctgggctagtattgctatgttaaggcaaaacagagccatgaccattaatatggccttcttcctgtaattcataaaataaacaaattattaattaaaacttgaataactcgttttaaaagagatgtattttgctaactttgcacattctcttttgaaaacatattcacactagatgattgttgaaagaagagattcaaggagccgggagatgtccgaaatcttccggttttttatttgtctctccttatttgtcagctaaagattattctgtatttttctctttattcatacttttcaatttttaaggttaaacaatcatagcattataatctctggtaaccggttagtagatagttatattgcgttcttcaatcttatattgcattttttccgtagaagccagtgcttccagtacttcctggatattttgttcacgacgaacgaagttgccatagaagcggaatgtttttaaggaatcattggctatgtgaatcttcacattatagctgcgttccagttctttggcgatatccggcaagagttcttcatcaaaaaacaagtaaccgtccgtccactgagacgcattggatgcggtaaccgactctacagtcaaaagcccgttcgccttatttaatacggccctttcatcaggtgaaaggacagcttctttttcttctctcaacaagttgttcaatccgaccttaccttccaacaaagaaacgaccacttcatgatcttccggatagtcacggaaattgaattttgttcccaacacctgtaattgcagatctttagtctttacgaaaaagggaatcttctcattccgctttacctcaaaatatccttccccttccagttctacttttcggttatcgacaccaaacccctgcgagtatgtcatgcgtgaaccggcattaagccagaccaatgtgccatccggcaaataaagttttgtttttgaccctaaaggggcttctaccgaaatatctgcaaaagtatctttcacattcacctctccctgccaataagaaatacatcccaccgctattatgattgcaacaaccgcagcataacgccacaacgctgacaggctaaaacctcgacgggaagtgctctgaatttccttctgactttcgacacggtttctaaaattctcaaacgctttatccttatcatagacagatgcggcctcacgacttacagctgaaaaccagatctcccgctgacggataaaatattgctgattttcagccgatgcggcaatccatgtttttagttcatctaaagcattcttatccagaccttcagtcagatagttggcaatcagttcatcaatatgtttattttcttcttccatatttatgctttctataaaggagacagttgttttttaattaagggtagtcagaaaatgattttttttcgctttacctgaaaaaaaatagtaatagagaaatcaggtacttactcaaatgagcgtgtaaagaagctaaagcattctttatatgatacttaactgtattaatagatattcccagttcaccggaaatttcttcgtatgattttccttcaaagcgacttttagcaaaaacccgacggcattcgtccggcaatttatcgatagccttatatatttcgttttcaagttcacgttccagtaaaatacctaacggatgcgaatcggacagtatgattttatcatccgttatctcatcgggcataagagcagaaaatgctatttctctcttttcacgttccgaattaagatagttaatgcaacgattacggacagctctcagcaggtaactacggatagagactgaaatatccaaagtctcacgtatctcccataaatgaaagatagtatctcctacaatggtttcggaaaggaactgatcttttagataaccattggcaacataacagagcagggcatagtgatgatcatatatgtaacgataagcattttcattgcctatcttcagttgttccactattaaagtttcagtattctccatgaatgtaccagtcagattaatagcacaaatttagagaattattcgaatttaaagcatataaagccaaaaatccctccaaagaaaaaaactttggagggatcttctttatactactctgtatacagtctatttcatcttatatacgagtgtaccacctttcagaatatcttcatgagaaatcgtattctttgtataaggttcgccattcagcgtgatactatccacatatttatgttccttcgataagttttcagcgatcacagtaaaggtctttccatcagccagatgtagcacaatcttcggtaactgaggagctccgaatacataatcaccgcttaccggatctaccggatagaaacccattgcactgaacatataccatgcggacatctgaccacagtcatcattaccacaaagtccgtcaggcttgttcttatattgagtatcaaagatttcacggattagttcctgtgtacgttccggacgacctgccaaagtatataaataagtaacatgatggctgggctcattaccatgtgcatactgtccgatcaaacctgtcacatcagcctgggttgtttccagtttcactgtaaacagagaatccagcttgttcaggaaaggttcttctccaccaaagagagcaatcaaaccgggaacatcgtgttgcacatgccaggtatattgccatgcatttccttccgtatagtcaccgcctgtactttccgcatgtcctacatcactaggattaaacggagatttccaggttccgtcagctttacgcggacgcataaaattcgtctgtgaatcgaataagttcttataataatctgcacgtttcgcaaagtaagcagcatcttcttcttttcccatacgacgggccatgtcagctgccgcataatcgtcatataccgattccagagttgaagagacggattccgcttttgtcagatctgtcgggaaatatccgtatttcgtatacacttcccagtcggacttcaacggatgagatacagtctgtgtcttcttcaccatattgaaagcacgttccgcatcaaaaccacggaaaccttttcggtaggcttcagcaataacagatacaccatgattgccgatcatacagaagttttcttttccccacaatgcccaaataggcaggaagccttgtacttcaccttgttctatcaatgaattaacaaaaccatccacacgttcgggaaccattaatgtatagaatggatgagcggcacgataagtatcccataaagagaaggttgaatagaatgttcctgttccggccttcacaatcgaatcggcagcattacgatacataccgtctacgtctgaaatctggttaggctgaatcagtgcgtgataaaaacaagtatagaaattcgtcttttcatcatccgtaccctctacgtccatgcgactcagatagctgttccattcgtcatgggcagccagcttcacaccgtcaaagttccagtctggtatttcagcctgcaagttcttctttgctccctctacgctggtagtcgaaagggccaccttcatcatcagttcatctcccggcttcaagtcgaaagtagcaatgattcgctttcctttctcagtttctcccatcggaaggtaaagcgaatctattaccggacgattaaacttcatcacaaagaagtagtcctgatcaacccagaccgtgttattcacgtgtccggtcagcgtctgagcatcttcccagttcacctcgcaactattcacttgtgaatgatattgttcttctctccaggcaggtccgtgctgcaagtcaatcagcagagaagctgaatccgctttatgatatgtataacgatgaagagctgcatggatagaagcagtcagttccgcctttacctgcggatcggataattcgactgtataatatcccggagtagcagcttccttgtctttcgggaaatggctgcggtaagcatcccatgcacgggcacgggtaccggtaactggcatcaccagaatatcccccaaatccatacatccggttccgttcagatgagtctgagtgaagccccagatcagagagtcctgataagtatattccgaacaatatctccaacctactgcacccgtcaccggactggtctgtatcattccgaaaggatagcaagctccggggaatgtatgcccattgtcagcagcaccaataaaggtattcacatactgagtgtaatctttcgtttccgcttgctccgtcggagaacaggaagtgtacataaacagtcccgccaaagcaacggccatcacaggggattttcttttcatgataatcataatgttaagttaatgctacaaatttagagaataattctcaatgctacactaaaatacaatagaaaaatggtccccaagtccgatcattcaaaatttatatctaccctgttccgggcagcattctaaaagcaaataaacctgattcattgtgacaaaacaaaaattcgcacgacttattgaataaatatcaactcaattatttatctttgttagctttaaaacaagctgactcaaaaaaacaatagtataatgaaagatttcttgaaatttacgctcgccactgtgaccggtatcatcctgtcaagcattgtattatttattatcggcatggtaacattgttcggcattgtatcaaccgcggatacagaaacaatagtgaaaaagaattctgtgatgatgctcgacctgaacggtgtattagtcgaacgcactcaggagagtccgttaggtatcttatcacagttgttcagcgacgactccaatacatacgggctggacgatattctttcttccatcaaaaaagcaaaagaaaatgaaaatatcaaaggaatttatctgcaggcaagtatgctcggaacttcgtatgcatctttgcaggaaatccgtaacgcattgctcgactttaaagaaagcggaaagttcatcatagcctacggagatagctatacacaaggactttattatctttccagtgtagcggacaaggtattgctcaatccgaaaggaatgattgagtggaaaggcatcgcttccgctcctctgttttataaagacttactgcaaaagatcggggtagaaatgcagatatttaaagtaggtacttataaatccgccgtagaaccgtttatttctacagaaatgagtcctgccaatcgtgaacaggtgacagcttttatcaactcgatctggggacaggttaccgaaggggtatctgcttcccgcagcctccccgtagattcactgaatgctttagctgaccgtatgctgatgttttatccggcagaggaaagtgtgcaatgtggcttggcggacacattgatttaccgcaatgatgttcgcaattatcttaaacagtgggtggacttgaaagaagatgaccgccttccggtgctagggttgagtgatatgatcaatgtgaaaaaaaacattccgaaagataaaagcggtaacatcgtagcggtctattatgcctccggagaaatcacagattacagcggttcttcaacttctgaagagggaattgtaggcacaaaagttattcgtgacttgcgtaagctaaaagatgacgaggatgtaaaagctgtcgttctccgtgttaattcaccgggtggaagtgcttttgcatccgaacaaatctggcatgccgtgaaagaactgaaaacagagaaaccagtaattgtttctatgggtgattatgccgcatcaggtggttattatatctcttgtgtagccgatacaatcgttgcagagccgactacattgacgggatccatcggaattttcggtatggtaccgaatgttaaggaattatcagaaaagatcggtttgacctacgatgtggtaaaaacaaataaattttcagattttggaaatatcatgcgtcctttcaatcaggatgagaagacactgatgcagatgatgattacccaaggttatgatacattcgtcaatcgctgcgctgaggggcgccatatgagcaaagaggccattgagaaaatagctgaaggtcgtgtatggacaggagaagctgctaaagaacttggactggtagacgtactcggaggtattgatacagctttggagattgctgtcaggaaagcaggaatcgaaggatatacagttgttttttatccggcaaaacaagacctcctttcttcactgctcaatacgaaacccactaattatgtggaatcacaaatattgaaaagcaagttaggagagtattatcaacaattcggtatgctgaaaaatttaaaagagcgttccatgattcaggcacgcattccgtttgaactaaatatcaagtaaactgtactgcatggacgaacactttatcaagatacataagtggctttaccctgtctcatggatttacggggcagtggtaacagtaagaaacaaactctttgactggggattcctccggtcaaagagttttggtgttcctgtcatctgcatcggcaacctgtctgtaggcggcacgggaaagacgccgcacaccgaatatctgataaagctgcttcgtgataactatcatgtggcagtattaagccggggatataaaaggcatagccgaggatatgtgcttgccactccccaaagtactgcacgcagcatcggtgacgagccttaccagatgcataccaagttcccgtctgtcacactagctgtcgatgagaaccgctgccatggcatagaacaattactatccatcaaagaaccgtccattgaagttgtattgctggatgatgctttccagcaccgttacgtcaagccgggactaagcatcctgctgacggattatcaccgcctcttctgcgacgatactttacttccggcaggtcgtctgcgcgagtctgtcaacggtaaaaaccgggcacaaatcgtcattgtcacaaagtgtccgcaggatattaagccgattgactataatattatcacaaaacgactgaacctttatccttatcaacagttatacttctcatcgtttcgttatggaaatctgcaaccggtatttccatcagcaaattcagagattgattctacagtgaatgagttagcgctgagtgctttaacgaatacggatattttgctggtaacgggcattgcatcacctgcgcctattctcgaagagttgaaaatgtataccgatcagattgattcgctttcattcgacgaccatcatcatttcagtcatcgggacatacaacagatcaaggaacgattcggaaaactgaaaggtgaacataaactgattgtcaccaccgagaaagatgcaacccgcctgattcatcatccggcattgagcgaggaactgaaaccgtttatttacgccttgccgattgagattgagatattacaaaatcaacaagataaatttaaccaacacattattggctatgttagagaaaatacaagaaacagcagcttttctgaaagggaaaatgcacaccagtcctgaaacagccatcatccttggcaccggacttggcagtttggcagacgagatcaccgagaagtatgaaataaagtattcggatattcctaacttcccggtgtctactgtcgaaggtcatagcggtaaactgattttcggcaagttgggcaacaaagacatcatggcaatgcaggggcgtttccattattatgaaggttattccatgaaggaagtgactttccctgtacgtgtaatgcgtgagctgggtatcaaaacattgtttgtatccaacgccagcggtggtacaaacgaagcttttgaaatcggtgacctgatgattatcaccgatcatatcaactacttccccgaacatccgcttcgtggcaagaatattccttatggtccacgcttcccggatatgagcgaagcatatgataaggaactgattcgtaaagctgacgagattgctcaggaaaaaggcattaaggtacaacatgggatttatatcggtacgcaaggccctactttcgagactcctgctgaatataaactattccacattctgggtgccgatgcagtcggtatgtctaccgttcccgaagtgatcgtagccaaccactgcggaatcaaggtattcggaatctccgtcatcactgacttgggagtagaaggaaaaattgtagaagtatcgcatgaagaagttcagaaggcagcggacgcagctcaacctaaaatgaccactatcatgcgtgaacttatcaaccgtgcttaatactaaactctatttatgcgaactgaaatagcaactctcggcgagttcggtctgatcgaccgcctcaccgagggaattaaaccagaaaacgaatcaaccaaatacggagtgggtgatgatgccgccgtcctctcctacccttcggagaaacaactattagtaacaaccgacttattaatggaaggtgttcatttcgacctgacttatgtccctctgaaacatctgggatataaatcggccgtagtcaatttctccgatatctatgcaatgaacggtacgccccggcagatcaccgtatcgctcgctctttccaaacgcttcagcgtagaggacatggaagagctttattcaggcattcgtctggcatgccaacagtatcatgttgacattatcggaggcgatacatcctcttctcttacgggacttgccatcagcatcacctgtatcggagatgccgataaagacaaagtggtctaccgcaacggagccaaagacactgacttaatctgtgtcagcggtgacttgggcgccgcctatatgggtctgcaactcctggaacgtgagaaaacagtactgaagggtgaaaaagatatccaaccggacttcaccggcaaagaatacttactggaacgccagttgaaaccggaagcccgtaaagatatcatcgaaaaactggcggctgccaatattgtccccacatccatgatggacatctccgatggtctgtcgtccgaattaatgcatatctgcaaacaaagtaatacgggatgccgtgtctatgaggaacatattcctattgactatcagacggctgtcatggcagaagaattcaacatgaacctgaccacttgtgccatgaatggcggtgaagattatgaattgcttttcactgtccccatcgccgatcatgagaaagtatcacagatggagggaatccgcctcatcgggcatatcaccaaacccgaactcggttgcgcattgattacccgtgacggacaagaatttgaattgaaggctcagggatggaatccgctaaaagaagataaatagattttctcagttatatactgaaaaatatttcattccatacaacactgataataagcaaagtagctttttatcagtgttttttatttatagaagccttgcagaatccaaaactttaactacctttgcaaccgcaaaagagaaacaactgagttgaattagccttacggtgccatagctcagttggtagagcaaaggactgaaaatccttgtgtccccggttcgattcctggtggcaccaccaaagaaagtacataaatgcttttcacacatgaaaacccttgaattagagatagttcaagggttctttttttaccctcactacgcattccgctacatatttgtgaagttggatttcgccaattcagtggctttttttaaggcttttgaaaaagccataaatacgcaccatacttcattgtttttcagctgtttgacaattccaatctccggtgtgaaaaagtaattttgcacacatgaccggatgaagtcgaaaaagtgaaagaaatttaaaaattcggtatttcccatcgggataaaaaaaaggaatcgaacccgggatacaaaaggcaattcgaacctgagaaaaatgggatttttatggcttttccacaagtccctcaaaaaaaccaccgaatttaacatttcgctccacgtcctcatgccatccggttttgacgaaacaattgaatgtaacacctcaaaaaacaaaagtgatgaaacaaggaacaatgaacattctgtttttcgtgcttaaaacgaaattgttgaaaaacggtgaggcaccggtattgatgcggataaccatcaatggagactatgacgatgtacgtatccaaagaagcgtacccctgaacttatggaacgccgccaaaggatgcagtaaaggcagggacagggcatcagtggcactgaacgcctatattgccgaactgcacgcacgcgccttggaaaaacacaaggaactggtattggaacaggccctgattaccccaaaactgattcttaaacgtgttttcgggaaagacaccgaaatgcgtacactgctcggcaccatgagggaaggcatcaaggaaatggaaatactggcgggtatagactactctcccgtcacgatcaaccggtataagaacgtggtgaagaaattacagctgctcatcccctcttattacggaaaggaggatgtcactttccatgagctgacaccggagttcatccgtgcgtttgacatctacctgaaaacggaggcgggactgtgccggaacacgatagtccgttatatgaaatgcttcaagaaatttaccaatatggcattggcaaaggaatggatgcgcaagaatcccttttacggttacaagatggagcaggacgagaccgatccggtattcctgacctatgacgagttgcagaccgtaatgaaaaagaaattcaccattccacggcttgaactggtcagggatgtctttgtcttcgcgtgtttcaccggtctggcattctccgatgttgccagtctgaacaaagagaatctggtacaggacaatctcggagactggtggataagaaaaggaagggtcaaattggaacaccgtaggaaggcttcttccatcagcaatattccattgctgcccgtacccctggccatattggagaaatacaaggaacatccgacctgcattaagaaaggatgctgtttgcccgtcatgtgcaaccagaagatgaacagctatctcaaggaaatagccgatttctgcggcattaagaagaatctgaccacgcacgttgcccgtcacactttcgggactacggtcacgcttgccaacaatgtgcctcttcaagatgtttccgtcatgctcggccatgcctccacacgtatgacacagcattatgcacgggtcatgaacagcagcctgaaagaagcaatgaacaacgtgaaggagcgtcttgcacaataagtatacaaattcagtcattaagccgtccccctagggatggctttttttgtaatctataattcacaatatcctgccgtcctttcaatttcttacctgcaaatatagccatttgtcgggttgattgcgcaaggcggcccctttcaggggctggttggctaaaagaaaatcatcctcgcttcgctgcggtattttcttttgccaagccttgctcaatccccgacaaaagacagccaggcaagtaagaaaacgaaaatccggctccatggagccgatcatgtcaaacttaaaaaaataaaggtatgaacagaaagacgacaagcaaaggacagcaggaagccaatccggaaatgacgatgttggtttatcgggaaatgagctatcctgcacgggaagtgcaaggcaaagatgggaactatctggtttccgtagaaagactggaacaggaactgctggatggcatcagaagccttgatccgacagcattcgatttggacgaagaaatcgcttactattgttcggacgaagagatccgcctgttgacggacgatgaactggaagaaatgatttacggctgacatttaaaaaagtaatgattatgaatgaaacaacagcaaaggtctgcgaagagcaagtagcagaccttaccatagagaatgcacacagggtcacgatgatccggaaaaaaggtacggactatccccccgtaccgttccatttcagaaaggagcatcatggaacgggcaactatgtacacctgtacggaaatccggaagatcacaatgaattgcattccaaggacttcaaagactgggaagccgtagcattcaaacatcctgcctatttggatgatatgtggaaacaggcttgcgacgcatacgcctggagttccttcaatccggagattcgcggcgagacggacatcatgatttacggagaggggctgcacaacgacctgcaactcatgccggaagaggaacgggatacatacatcgccgcctaccggcagaagttgtccgcccagctctcggtcctctcccgctgtgccaacccgatggtgacgggacggagcggatttgattactacaggcaggaaaaaacgaacagaagctatcagaaccgttacgaagaattccgcaattggcggaaaaaagttcttgaaaccgtcagacggaaaaaggaagccgcacgaccggaggaagagaaacaggaaaaggcatggcagacgctcaaacgcgacatcaagagcagtgccgataccatccacgggattgataccggacaatgccggggctatagccgtgccctgtttgtcagcagcatcctgaacaaggtatccactttggccaatcacggggaagtggaaatcgtccgtagggccgtggacttcatttccgaatataacgcaagggtgaagaaacccgtcatcacaccgagaaacaaattcttccaattgccggaactggcggaacggatgcgcgaaaagctgaaagcgatgcaaagccgggaaaacaaggaagtgccgttcgagggcgggacacttgtatggaactatggggaagaccgccttcagatcctgtttgacaggattcctgaagacagcagacgaaaggaactgaaatcctccggattccgctggtcacccaaaaacaaggcatggcaacggcagctcacctccaatgccctcagtgccgccaaaagagtgttgaaccttcaaaacatctgaaccatgaataacgacaaactgaaattcgtagtcgattcacgcagttttgacggcagctgcgtgaccaccatgtctgacggaatacacggcgactaccaccatgagacactggaggaactgagagacagggaaaagaacccgtgtctcacagccgtgtccggaaataccgtccgcaaaatgatacgcatccacctgcaatccctctgcgccccgttcagtgagattacggaagaaagatatttcgactacatggatgtcttgccccccatccgccatacccggaatttctttttcctgggagagccttatcatgcggacatctaccggttctgtttccgggcgggcggacgctacttcacgggactccgctccgttaccacgccaaggaaggagctggaacggcagatggacaaccattaccggaacattaccttcaaaggagacatccagaaagaaaagccgatggtcatctccggccacgcacggcatgcctctataattatagttccttatctgtttcttgacataaatggcgagaaaaagttcatctgcaacctgatgagaggaacggacgaatcgtcaggcagggatgtgaggctggaaaccgccaaaatcctgcgaagcctgcgccgtcatcatttcctctacttctccggctatgagggaaacgacgatatggacaggttcctaggcgaagtgatgaagaaaaagcacaccctgctggcaaacggcaacttcttccaatatcccgtgaaccgggagtccgtgtcgtttaccggaacggtcagggaaacaggcgagccgttcttcttccggatttacgacagggagctgttcctacacctgttgtacgtcctgagaggcatcaaaagggaaaaagctaaaatataacgtgacacataacgacggtatggtgactgtctttccgatccgtcaccatactaaaaaaacaatgagatcatgagaactgtgaccgaagaatcgttgcgacgcaggttggcccgtctggagtcggccttggaaagcgaaaaggcacgcctgagaaaagtatgcggcggcatcccctggggagccgggatgaggcgtaccaaatgtaccccctcattccgaagggaggacgaactgatcgggaaaatcaaggcggtgagacagcaactctcccaaatgtccgcaggcggtgacaatcacacgtttaaagaaacaagcaggtgaattccgaccaattaacttgcaagtcaataattttaaaaccagttacgaatatgaacacccgattggctataatccgttcagagggaaaagaacatctctgttaccgggaagaggaatgttttgtcgatgtatcctatccgatggtgacatttaccaaaggggaggatgattttgaaattatcaaatgcgaccatccgtccatggaagagactttcctgtatcaggaaagccgtctctcaatcgtgattgaaatataccataacggctggccggcattgtctctgaaagatcccgtgacccatgagatatacacggtcctgacggttaacctggaagataaggcggcattctcactgcctgacagggcattcgtggacatcaacaacaatcctgatgccatggagttccttctgtccaacaaattggctgaggatacaggctataaacgtcagagcggctgggtaagctacccgatggtcacacttaaccttccgacgttttacaggcttgacccacatgtctttagcgcaatattgaatatccggtaatccttccgggcaatgaatctggtatcaacaatcaaatggaaagaatcatgaaaagatatgacataagagtaaggtattccttcgagggcacttacacggtagcggcagaagaccgcgatgaagcaaaaagaatggtaaatgacgattgcggtcttgttttgggcggcgatatccacacgacacgcgatgacgatgaagtgttggagtgggatttctgtatccatcccgacacgcggattctctccttgcaggaaagaggcggaaaaggaagtttaccgtcagaagccgttgatttcagcggcaggatcaaggaactgcggggggacatcatcgacgcgatacggcagttgctccatgctcactgcatgaaagaaattcgtcttccggaagaggattatgatccggtctgggtgatatggtttggcaagaacggagaaccatatgaatgcagggtgacaggactccgggtaacggcggacagcctgaccgtccttgccgaagagaaagaaagcggtgacgaggtgcagtgtcacagcccgtttgaactcggcgcaaagaacatagactggcttcatgagatgtatgaggctgtgtggcatcaactgagagaaacaaacaatgtagaatcacaaatagaagaaccatgaaatatcaagcggaaaataccgtctccagtttcttctactacatgtggaacgcctggagcgaggaggaatgcaaagccgtgtatggcggcatgtacccgcatttctgggaaaaatggtgcgtggcgacagacaagggcacattcggcgcggcggaacggttctacctggaactctcggaagacaaccgcaggattctggtggaacgggccgtctcgatatatgacggacgaggcctcagaaacaggaacagaaacataaaaaatcaaacagcatgcagggaaacattatcagtctgatctgcaactcatgcggttgcggtcaaacggaagcacaggaatacctggactccgaaatacggtacctgcgcgaattgcaggaggcggacgacctgagagaagatgacatggaaacggcctgtctcaacctcggttttgagcttgactaccgggaatattttatcaaccgcctcgcaggggcataaaaaacttatggctatgacttattttcagaacatacactctctggcggacttgaagaaagaataccgccggctggcattggagcaccacccggacaagggtggtgacaccgcaatcatgcaacaggtgaccaccgagtttggaaggctttttgaggcttggaaagaaaaaccggatattccctcgacctcaaccggatatgaatatgactatccgggagccacggcaaaggaatacaccgggtatgtgtataacgaataccgctggaaaggccgcaattacaaggggcagcacgctccggaaatcgtgggactggtacgggcatggctcaaggagacctatccgggatacaagttctctgccagacgggagaattaccactccatccatatccggttgatgaaagcggatttcgaggcgttcaccaaagagtccggaaaagttcaaggcgatgtcaaccaccatcatatccattcagacaaatcattgacggacagggcaaaggatgtaatgatgaatatctgcgatttcgtcatgtcgtacaatttcgatgacagcgcccccatgacggactattttcataccaacttttacctgacgctcggaatcggaagttacaaacagccgtacaaggtggaaccgcccaaactcggcagcaaagacaagccggaggtattcaagcatccggaaggtccggcacacaaggcaatgcgccaggcattgggcaaagcgcgtttcggcatcatcgaaagccggaagtatgccggggaaataattctgggggaagactgtttcggctcacggggcgaagtctatttttggccgaaggaatattcaagcgcaaaaatggcccaaaaacgcatcgacaaactggaggaagccggaataaagtgcgaacccaccggctataacggaggatacatccgcctgctcgggtacacccctgaaatgagaaattccctggaacgggaacgtcaggagtatgccgccgcgtatcaggcatggtactcaaaacagaatttgaaaacaatctgattcagaaattatggatacaaacaatttggacaagtggtggtacggacttccgggaaacaccagacaggctataggaaacgatggaatatgggaaaaactggatatgccgtcccgttcggcgctacaccgatattcccggcttagaatttacggaacggcaaagaacagggatgaggaacgcacgctgctcaatgaaatcgcgtgcggactgggcgaccttgcccttgtccgtaaaaacggcatcgcgttggaggaaatgtgcaacgggaacggggaattttacgatgaataccaggaacagttcaacatattatatgacaattacggacacacaatagaaaatataagctggccggactggatcggacatacaattccgacaaacagggaactgggccgattattggaacatcacggttacaagcgtatggaaatcgataccgacagaagaatcccgaaaactttctatgttttccgtcgtgggttgcacatcaacgcaagcgaggacttgtcttaccacatcgtaccacaacaggacagtttcggactggggcgttttgctgtatgtgctaccaaagacggtgaaagcttccagctgggaactgactgtgcccggctctttttgaggcgcttccttgccttcctgaagggtgaaagaagcgggaaagagattatagatgaaatatgcaacaaccgacaaactgaacgatagtatgaaagcaaaagtattcaagtacaagtctgatgggaataccgtcgtggctccttatatggaactggagccgtacgcggagaatgtatatctctccctgtcgagaaagaacgaatacgggaatgaagacgatgactgtttccatgtggtctgccggattgaaaacgtttatttctctagcgggcagtattcacgccggttcctcaagggagaaggttgcagagaggaagccgccacctattgcaggaactggattgcggatacgcttcaaagtgcggaaagaggagccttcgtcaatttgatctccgtccgcgtgttcgaagctctcggacttgacaccacccccttggtgcaagcccgtgaggaatataaaagaatacaggagcagaaacgcagggagcagaaggagaaagaggcggaagagcgcaaagtgcaggaagagcaacatcagcggctgctcaatgaacagaaacagaaattcctggacggggaacggatcacgggagaaatgttccttgaaatcaccggaagggacggttttgacatccatatcagaaccaaagggacattcaacaggcatgtgaggggcattgacaggaacggaaccgtcagtttccggaaaatcaagggctgccggactccggactttaccggatgccataaggccgtgtccgtctatctggcgttcataacagaaaaagagggcaaataattaaatccggggcggtaacggtctgctccatgcagctgttaccgctaccggcttccggcctcacaattcacggttcagcgccattgccagcggaaacatcaaccggttataggctttaagcttttgcaaattcagtacatatccggcatagggattggtcagatcggtatagaagaatacatcggtaaatcccgcgtgttcctccacgacttcaccctccaacggaatctcctccacattgaaccgctccagaggtagttcttccagacgggtctgttccgcatttcccaacacattgaggttacggttaaacagcacgaatcctttcttcctgtaatccacacgcataccgtacggacgctccacaaggaaagcatccgccgctttctttacatagttttccataatcctgaaattagaaattgcaaaaatacagcatttgtccggcaatggcgaacaaatcaggaagattatctaaggaatccacacaaaatcccacaacaaaaaacaaccgtatattttatttcccaccctgcaaaggtagtcccgtgtcctgtgtacccgtacaaggtcaggcccctgcggggttggctgaaagaaaatcatcctcgcttcgctgcggtattttctttcgccaaaccttgcgggtacggccacgggactgtcaggcaggcgagaaataaaaataccggctcccggagccggacgtgtttaactgataaaaatacaaaagttatgaaaatcctgaatgaagaacatttcgagaacgtaaagcgctatgccgaatccatcggtgacacctcacttcaaaagtgcttggaacggttgaagagttgggaagggaatcctgattatccctgcgaaatctcactctactatgaccatgccccgtactcgttcggcttcacacagcactatcccgacggaaggacaggtatcgtgggaggtctgctctatcatggaatacctgacaggtcgtttgccgtaacattgcagccgttccacggatggcagatacatacctgaaaaacatgaaacttgacaatgaccgaaaagcagacttcagaacagagaatccgaggtctgctttttcatttcttgctgtaaagatagccgttttccgggctgattgtgcaaggcggcccctttcaggggctgggttggctgaaagaaaatcatcctcgcttcgctgcggtattttctttcgccaagccttgccgcaatccccggaaaacagacaggaaagacatcaagaaataaaaatgcctacccatgtaggccgatgttttacttaaaaaagaacagatatggaaacactggattataaccagctgctgcttgtctccctgtggcaatacaaccaccacggggatgaagggctgactcctgcacttttcgaggaaacgttcggaaaggtctatggaggtcactattacgaaaaatggaccggctacttcaatcggaatctctgggacatgattgcctatttcagaagcgagaaggagaacggacagaagttctgcgacatggttgcccgtcaggtcaaattgtatcaacaaaaacgatctcaatatgaagtacggtaatttttatgacctggaaagtctgactctgctcaacaggcatgaagggtgtgcctgctccataaaggaatgtgatgtggagaaggtgaaccggctgatttcaaggatgcgggaggacagggaaagagccggtttaccgactgcaggagacgttgtcacttatatcacccgtggcggtgactattatccgcaggcacacattgaaaggggcgatgaccgggaagttcatatctgccttctcccacagacacctttttgccatgaaaatgaaaagtgtaccggttacaataccgaaggaggcccttgggttacaaccggtccggaattgctgattcccgatggcatacgcagcaaacagttccggatgtgggggcataccggaaggcacaggaacggtgccgtcctcttccacacattcgtcagggcatggaaatacacggaacccgatcctctgtacggaaagtacaccacaaaagaatggaagagatacctcatcgagtgtcagccggatattgaaccggctgatgcctttgtctatcggaatgaggcattcaccctttactcgcgggaagaactggaacggctggtcgggattctgcacggaaagcttttcaacggattccgtcccggtctgttcatactctgggcataccgtatggaatggaaggaacttcccgcatgggaatggaacatgctgaaagcggacacccatctctctttccttggcatttctcccgtcaggatacagactgaccataaaagacatatagtaacaatctataaaaaatcagagtaatatggtaccatacaacacaccgcaggcgatacgtccgcttgagaaaatggtctgtgatttcgcctattcgaacggctacgatccgatatccgttttcaacgatttcctgcgctatgtcattcacgggttctctcccggcgcaccgccccttatggactggaaatacaaacggcagcagaacaggcattttatggaaatgcttaccggatggatacggctcatgcagcgggaattgcaatccggcggatggtttgatgcgttcggtgacctcttcatggcaatatcctccaaaagcggtcggcaggtgaacggacagttcttcactccgccggatatctgcgacctgatggtcttatgtaccgattcgggggagacagcgacaggaaaacgtatctgtgacccgacatgcggaagcggaaggctgctgctggcatatcatgtacgccacctgggtaattatctggttgcagaggatgtcagccgtacctgttgcctgatgaccgtttgcaacatgctcgtacatggctgcataggtgaggtcatccaccatgacagcctctgccccgaaaacttcatggacggctggatggtaaaccatacgctgacccggacgggcattccctccattcgccggatgagtgaggaggaatatcggacaagcaggaacatgtccgttgacctgctcagaaagcggaaagagaaattgcgccaaatgcagcctggcaagaaacaattgccatataaacaacagaatttataaacaataaaccgaatgattatgaaactgaatgttagcaacgaattgaaatcccgcctgacccatgcggcggaaaacggaagtgtgatagccaaagatatcctttcggaagtaaaaaagaatgtaccggtggaagaagtcatacgggggtcctacaattttttctccaccaaacgcaaacggacggaagccggcacgttcaagaaaatccggatcgtgttcacggcatgcaacaaagacttgggccatcccaatttcccggaccggaacaatccgcaggcaccctggtttccagagaaccggacagatctggaaccgtccacgtttatcgagctgttcaaaaatctgggaccgtaccagcccgatgaaatcaactatttctgcagcgccatctcactggacagcaaggtcacaatcagactgcatgacagtatgaacgattttatggaggcttatctggaaagcaactatagtcccatatctgacagtagcgaatccagcctgcacaactcctgtatgagatatgaagacaaggcccgtaatgcagcggatttctatgccaatttcgcaggagccaaaatactcgtggcaagggatgacagcagcaatgtggtcggacgggccattgtatggaacgagataacattgtggaaatcaataaacacaccgattgccgcctccctgctggatcgtatctattcctcacacgcattcgtcgtcgaactgatccgcaagcaggcgcaggaggcaggcatcctgttgcgacgcagatacaacgattatacacatacgacggatttcaccgtactgaatcccattgaggggcaggaatgggcggccggagataatatacaggtctctttgacggtgaaagtgcccgcctgcaggtggcacaagaaaggggtgccttacctcgacacgttctacagccttcatctgacggacggtaacctggaactgagaaatacggagggcgacacgagcatagccacctgccggagcacggaagggtgtgcaaacaggaaaaaatatgtatgtcccaaatgcgggaagatacatatcttcccggatgcggcattctgcaagaactgtcaggatatgtactatgtatctaccgtattcgggaaagtcctgaaaggattatcagtggaatataaaggaaagaaatatccgtcttttctctttcgtaaagggcgtcccgtaccggaattcagacgatacctgcaaatcgaaaaattgttcatttcctaaaatatcattatcatggaaaaactaatggctctttacggcatttcttccccctctggcagagaggggaagatggctaaattcatcatagaggaactcaaaaggatggagattcctttccggcaagacaggtacggaaacatctatgcggtcaaaggcaaccgggaaagctacccctgtgtcgtggcgcacatggatgaggtacaccggcgcaagacaggctcttatgcagcccatcttgtggcggactcgatgattgtcggctatgatcacaagcgtaaacggatgaccggaatcggtgcggatgacaagaacggcatctggatctgcctgaaatgcctggaggattgcaagacggtgaaatgtgccttcttcgtacaggaggaggtgggatgcataggcagcagccatgccgatatgtccttcttttccgattgccgtttcgtgattcagtgtgaccggaaagggaacggggatatggtaacacaaatcaatgggatgaagctctgctccaacgagttcatttcagctatagatgtccggaagtacggctacaagccggcacagggactgaatacagatgtggcggctttgaaaaggaacggtctggaagtatcctgtatcaatctttcctgtggatattacgaacctcatacggacaacgaatataccgtcgtggctgatctttgcaagtgttaccgctttgtccggcatatcatctgctgccacaagggaaccagcatgcatataccggaagcggggaaaaaaactttccccggatattatgaactgttcgggctgaccggatatagcgaagaggattatatccgtttgtcagaagaaaaatacatgggacatgctaaaacaaccaagacaagctctaagaataaattctgattcatcaacattaaaaacatagtattatggaaacaacagtaatgccggcagctgcatcggtacagaagcagcagggcctcaaccaggtagtcattaacaaggtacagcggatgatagaaggcaggcaaggtggtgtcatggacaccattaaccgtctgctcagtgagggacggatcgcgcaggatttcatcgctcccatcggggtaagccaacgtagcaaggaacgccccgttatctctttcaaagcggaaggaagggtacagatggcaatgcccgaagggaacttcaacctgcacggcaacgccataagccagatttcggagaagatgggcattcccgccaaatacctgcgcgagctttccgccggggatgtttggcagaaacagttgtgcgccaccatcctgaacgagcattcgggatggaccgagcgtacacgggtactgatacgggcggtaggaatggaagtccggggcgtattgtcggactcctaccgtcggctgaactcggtggatatactgaccgctttcatccgtgaggcgggaggacagggagcggtcgtgtccgatgcctatatgaacgacacgaaagtatggtgtgaaacaatcctgcccactccgatagagatacccacccgtaagaacggaacggtcatcatcttcgcaggagcacgcttctccacatccgactatggcaacggatcggtcgatatgcggtcgttcctgctcaacggggcgtgcctgaacgggatggtcagggagtccgtcatgcggcagatacaccttggaggccgactgccggaatccctgtccctctcccaaaagacctacgaactggacacgcagaccaccgtatcggctgtttccgacctgaccaaaggactgtacagcaaagacaccatcatgcagaaggccatcgaaattcaaggagcatcggagatagacgtggatttcgacaaggaactgaagaatctggtgcagaaaggagccttgttgaaaaacgagggacgtgaggtcgagaaactgctgatgaacaacaatcctgacgacggagttacaggcggggccacgctatggaaactgacacagggaatcaccgcctttgcaagggaacagcagccagaacgctgccgggaactgcatgaaatttcgggacagctgatgaaccgggtaaagataaattaagagaataacaaccgaattgtatgacaagggcggccgtgagtcgcccgtaaagcagaagaacaatggaaaataatatagtgtgcagcagatgcggatcggccaatgtcaggtgtgaggcaatggtaaaccccaacacaaaagagttcgaccacttcacggacgaagctttttattacgggtggtgcgaaaactgcggattgggagttgccctgaccgacaaggaggaaatccggaacgaaattttggagaaataccacaggttcaagaaagagaatgcttgtgagccacattacgcaaattgccggattgtccaaagggacagcggtcaggtcaaggatgtaagaattatgctttcaccggacaccggtatggccgatgacggtattttcttttactgccacacattggaaagccttattgggctgtccgttcccggcagggaaagtttcacccttacggaatgtttcggttttgccttgctgacagacagggaaaagatggaacggcaggtatttaaacatgaagcggacggaaagcccgttatcgtaacaggcagggaagtgctgcttttctatgggaagcactatggtataagaccggaagaattgaagcaatacgcaacggagtattgctgccatatcaaacattacagggaatatggatatccgttgctggacaggtccctcgtgaaaaaaatgctggaggaagaggaacggattacaaaaggggaaacacggtcattcactctgcggatacactttccttggcatgtgaaaatcacaaaagaggataatcctgaatatgccccatacagatatgccttgaatgcctattgcctggacaatccgcaatgttttaaccgcagatacaccactttggagaaagccttgctccattgtctgaatggattcaatgaaaatgccacaatcaaagaccggtatctttcaataggggaatacttgcttcaaaagtaagaatagcagacaaatacatcttaaaaaaacagaaacgtcacaaggtgatgtatatcacatcatacctgtggcgtttctgtttttagccctttcccattttatgactctgcccgctttgtaaatgtatctaatttgactattcaagtcattttatccaagcagctatttgctcgttatttaacttgaacagggtaagtatatggaattaaattttgattatagtgcactctaaataaaagactatctccttccagaaaagcatcaactaaatcaggattcttgtttttttagttgctgaatactttcaatatgtaatgtgtctttatggttttcgttcatataatcataatatggttgggaaaaatgtccttatttattatttatatgaggtgagtatttacgacaataccctaaataggcttgtctgatttataataactgattaaacattaacgggaataaccttgatagctattcccgttattttcttactcgttttccagtttctccatcatatgctgacagtagttacaataaccgccattatcaagagcttcaagcatttcagaccaaggaatatcacaagcacatctttgacattcctcaacgctgttattcctaatcatcttattaaagacatacttttgtttatcagataaattgtcatatcctttgtccaacatccttttagctataccagcttctttgtcatctaaacgaccagactttatcaagtcctccagaaaaccttcaaaatcttcttcaataaatctttcttctttcatattccaatatttaaaaatctatttttcccagtttaaataacacattacagtccgttatcttttcaacttcagacatacccaagtataaacgagtataatcgggtgcggtaagagcaagtttattaccaatcacttctctaaccaaataagcttttgtcttattccctatggggtaaattcaatccaatatttataccatattttgttcaattttacagtgttaaacgaatccttttcctcctgatactacgaatattaggggacacttttatatgtacaagaggtatgcctatatctctattctgacaaaatgtcactcatatatctttcccaaagttttatatatagaataaagaaaatttgtaagtatgaacagaacaataatttcaattgaagtacaagcccacaatggtaaggaagccactatcattgtcaaaggagaacagaacaatcagattatgtttgaaaagcaattcgagtataaagacgaagaaaagcattctttgcggttacacttactttcagaaaggtttcatcgcaaattgccacaattaggtgatagcttaggcgttttttgtatccgtaaacttttcaatgatataacgatacgaagtaaaagttcacgaaacatcatatcgtctatgctatgcagtatcttcccccaaaccggaaaaggttctgcatgagaaaagaaagcggaacgctgccgatccgtatcaacaagcatcatatccaaaatacaattgctgccattagattccatttctatatatatgtttcctcctaacattcctgttacaggtcttcctttacggtctatattacgggaaaaacagtatttatactttagtagattgcatttgtagccatttatttccaatattatttctgaattcatgacgacttgttttatgcatttgacattacatctcaaacttagcaaaaaatcaagaaagacaatgttcaaagagcattttttatgcaccatatgctcaataacacattttatgtctttcggttacattaaaatacaacacctgttagggatatgttcataccggacaaataaaaaagattcggtcgtctcgtaacaaccaaacctttatcaacaagcaatctacggtatatagaacagttcaaactcctcttttcttcttctctctatgcttggaatgactttcccccgataacagcggaacgatacatattccttgtaaatatcccggttgccgctgtccagtttctgaatcagtttgcttttaggtatcttgccgttgccgatcagacggtaacagcctacattaaagcctaacagacttaaaaggagcgaatctttcccatattttcggaataccttcaaacaccgttcaaggtcgcatctcaaaagtgagtccgcctgtgcctcactcaggttctcggtcagcgtctcgtggggaagcaggcggtgtccgtaaccgatgtaaggcattttcccccggtgccagccttcccaccgcttgatgcaggctaccgccttatctttgtcagacgggggattttccgccttgccgtacaagacaagtaacagaaagatcataacagccggtattcttttcatgcagcctccttgttattttcttcatccgtatcctttccattaaaatcatatgtcaattgttgcagattcccccaattatcttcaagatagaggtctatggtctgggattccttgccgctttgcgaagtatagtaaagacggaatttccattcgttcagcagataacggtcattgggcttcagtaccgttccgtcctccatcttcagactgcccttaccatccggctggaaataccttagcgtatagacggttccggtaaagttcccttccggcttgatttccagccggatttccacagtctccccatcggtaatctcatccgctaccggcatggcttctaccgcaaacgggtattcctgtttgatatccagctcattgtcacaagcgacaagaccaagaaaggagaatgccatacagcaggctgtcagcataaaatcaaggatttttcttttcatgggtatgtattcttttaaggttagaaaatgtattttactccgattccatactggaagtggcagattcccgaggcgctgccccacacgaaacgctcacgcagacgcaccagcaggacaaccctgtcggacaggtatccttccgcttccagcgttaccgcgccgccatagatgaaagactcgcattgctgcaaaacggctccgtcatccagcagccggtctccttcgttcacggtctcatagcccaacagggcggaagcgccgaggttcaggaagaaggacttgccgggggtggaaaagaacgtatggtaataaccgccttcccccgtatattgcgacaagggtatatgcgtactccggtaagggatgttacgtttcagcatctcaccgccaaacatccactggtttctgttcccggtacaggtggatacagccagcgagaaggcatagcctgcatcgtgacggtttgcccggctgtaaaatccgtcggccatttcagtggtgaagcggacggctttcattcccggcaggcggcgttgggcttctgcctgccccgtaaagagggcaagcaggagggtaataaagagggagtttcttttcatggcgttcatctgactttcagttcattgacggtttctgcgcgtaccaggtcctcattctctacatcaaaggactgatgccggccgccttgcttctcatacatttccactatcagcttcttgtcgtcgggaatggtgaacttgggcagggcaaacaccgtccgctcgttcttcttcccgtccacacgggtcacatagttgaaggcacgaagcggatagatgacctgttcctgcatggcggtacgtttcatgattttcttgtccacgatcttgaaggtcacgaagtccacgtcgaaaggcacgttcgtggcgttcttcacttcggtatggaaatagatcagttcgccgtgcgcataaagtcctttaagcagatattgcactccgaaccgtttgcagccgatgtgcttgaccttgcgtttgttctgttcatacacggatttcatgatcagccgtaccagacggggagactccccggcgagttcctgcaagtagatttccatcgcattgttcggacggttcacggcctctccgtcatggatgaagtcgcacatttccacattcagcagcaaaggctcgtcggcatacttgacgttgaatgtatagaagttgccgtcttcggtaattacgctcatgtttgtctcactccggaaatgtttccgggttgccttcacacggatcacattttccgcaccgtccgccttgcccgctatcagattgggcgaacccaggtccacatatctcacgggagagggaaaaataatatgtacggtcttgtcatatgtgatttccagaccgtgtgggggaatcatccggctgaatccgatcttgcggctcagtccttcataataatccccgctgctctgctgcgcgtatgcagccactgtgcccgcaatcagggcaagcatcatcagaatcttcttcatgtgtgtttcttggttgattggtgaataaatggttgatttcctttcctccttcatttttcaggagaatgcagcaacagccggtgtccggccttcagggtgattttcaccgtgcgcatcttcttgcccacatattgtgacataccctgtatcacccccttgcccacatccgaggcaatctgcgctccggcatccgttgagatattgatgctgcttcctatagaggtgcccatgccggcggcaatctcacgtgcggcatcatactccatcgagttcggtacaaggattccctgctgcccgtcagcgtcatacacttcgagttccaccggaaacagcgtgcccctgtactccactgtctcgatcaggattcccatccgttccccctcgacacgtgtaccgccgaccagtaccgtacctttggggataaggagatcgtccactgccatcggctcaagcaggcggatacgcagtgcctgtccgtcagatacggtctgcgtgccatgcacacaggcggcgatggtgttcctgccggaagatggcattttgcctaccggggtgtggaagccggtatttctctcgcctgcatatccggaagcaatgtcttcattgcctgcaggctgggcgagtgatgacaccatccggttctgtacccgttttacaggccggacagccgtccgttctttccggctgtttggggcattggccgtagaggaagcatcaggctctttcccgttgtagcgggcagccagctcgtaggacttttccagcagagccatcttttcttccagggtctggccttccgcctgttcttccgccggcttcctttctttttccagatcctcaatacggcggagcagatcggcatctggctgattttcattccgggtatatacagtgcccagcgaacggttcatattccggtaggcttctgcagaggaacggatggagccgggggctttccccttttccggttccggcggaagttccatgtttgcttttcctgcagtaagaccggcagtatcctgaccgcccttgttgagcagttcggacatctcctggaaggttcccctgcgccatttttccttttttgccagtgcttcctgctcataggcgcttaccttgttgccctccatttccgaatcttccggtgaaggcatctccacgttgaaacccttgcctttttccatttccgccttctccttttccgacggactgaataccagcaggaggaaccccatgcacagcaggcagagaaacggatagacaatatactttgcgcgccggcgcttctcttcgggagtcagcggcttgtcatttgacactccgagccgttccctgattttctgaaagtccattttcatgtttatggatgtttgaatgaatgtttcttgttctttccgaccggaacacgacggaacggatatgtcccattgccggtctttggcccggctccccgaaacgggatacacaggagagaatcgagtacagacaggaggcagcaagcaggaacgagaccgtgcctgccagaaggatgcgctgctttcctgtcagccgccggcagaacagccgtacccggctgtccgcatggccgaagaatccgcgttttcccctcatcgttccgcacttcttatgtccttattctccagcacggtaaactgctcgataatgaatccgttgggattgtcatccgaacgtcctgtgttttgaagcgagcaggaagttacgaggctgcgctcggtcacgttgctttcacggataatcagctgccgggcgtatgtccgcaccttgtaagggtaggcggcaaagtcgcacaccacgctgtccacatgcaccacctggttgatgttgcctgaaatcaggcggttgtaataccctctttcggcaaaatccacatagtagtgataggcactcttgtctgccagttgcagggcacggttgatattgtgctcgatggcatccttctggggtgagagcgagaaaaacagttcgtgaaagcgccttacatgttcccgcgcctcggcaggcctgttctgtgagaggtcctgcgaaagggccatcatcagcgatttgcccccgtcaagcacatagattttctcgcgttgcttctcggcaaagcggtatgagctccacagcgcatatccggtaacgagcgcacagcagcaggcaaagaccgccagcagcaggcggatgcgcttgaagctgctctcaatgtttgtcaatgacttgaattccatttttttgatgtctggtttgaatgaataaatatttccggtatgacgggacatcccgttccgacaagtcaccggacccgtcatcttgggttgcccgactcatgggaaggaggctccgcagggtttatttgcccctcagcctgcctccgatattccccaatacggcaccgcctgctccggctgcaagcccccctgtcttggtggctgtacggttcaggttacggctgaagtttccggcaccgcctgcctgcactatccagcctgctaccgtaggcacggtgaagtatccgataatcccgatcagcataaagatgatgtagacactgttcgagttgtctatcgagtagtccggattgttctgcagttcctgaatgtcattctgaagcatcagtacctgaagcttggcaagcagggtgctgaacaggtcgctgaccggaagccacaggtaaacggaaatatatctcgtgaaccactgtccgagcgtggactggaatccgtcccatacactgaaggcgaacgctaccggtcccagtatcgagagtacgaccaggaaaaaagtcctcacggtgtctatcagcagcgatgccgctgcgaatatcagctccagcaggctgcggaatgcatcccggattttcttttccagattatacatcccgacttccacatacatgcccagccgggaggcggtatctatggttgaccagcccagttcatccagctgacggtcaaactcctcgtcacttaccagatatgctgtttcgggattgcggagcatggcctccttttccagttcctccttttggatccggtactgttccatatccatcgtctgtccttcgagcatcttgtgtgtgccctgcacgatgggactgagaatattgttcagcgtgccgagcaccagcgtgggaaagagcaggatgcagatgcctatggcaaagggacgcagcaggggataaacatctatcggttcggcacgtgccatcgactgccatacacggacggcaacgtagaacaacgcacccagtccggcaagtcccttgcccacgtccatcatgtcctcgcaaaggggaagcatctcgtcatacagggttgccagtatggtgtgcaggttggcaaaatctatcgacaacggcatcatggctaccagtatttggaggtttcattcccatagagccgcatcacacgttccaggtcgttcttctttctggccctgaggtagcttacggctatgttcttgttcgtataatagctcacaaggttgcggtaacggcgcatctcgtaatagcagttgtccaccacgtccatacggtccttgtcggtcatggacagggtactgacattgataacctgtttcagatcctgcaacacgccgttgctctcttccagcaggcgggtgtaaccgaaggcgatggcgtccagttcgcgcggtgagaagttttcatcgttcatcatcttgccgaagttggttacatagatgtcggacacgtcgcccaccatcaggatgatgtcacgcaccttgcgggcatcctgtatcaggttgttgaccgatttcagctggtcgtaatatttcttggcctgctcatagatctttactgtctcggcaaagctttctgccgtattgactgccgtctttgaggtatgggcgatattgtccgacatgtttatgatgctttgggccagattgccgggatctgtcaccacccattgggcgcgtgctccggtaacgcccagtacaaatgccgttccgatcagaagcgttcttgccttcatgcccgttcctccttccttacatagtctccgcccggtgagaatgtcagcacgtcgactgcctcattgtaggacacatcgacacggtagcccgtattgacaaacaggtttccgttttcttccaccagcaggtaagtctgcggcttcagccttcgggttctcccgctacgggaaaacaccgtcaccttatagcattctccttccttgtataccagcacgtcaggtctgccttccacgctggtccacgttccgcagatcttgtcgcggtcgataccgctttccgaacagctctgtaatatcatggcggccatgcttatcagacataccgccagcctcataaggggtctgtttctcataatcgttttcatttcgggtttgatacctgtttctgttcctctcgctttttctccgccagacggcggatggctccttccagactgccctccggtcctccggcaatccgttgtacttccagtttctccgactcctcggtcgtgaacgtgaagtattcttcctcgctcacttccgtggcatatactgccgagcaggttcctccaagccctatccatacttcccggtagaagcgcccgggatggttcgcctggttgatggaaagaatctgccctttctctttctcggtcagaccgagcagccgctggatgtgctcgaacttgttcatgtatttccgctggtcaagcaggatcttgcagtcagagttgttgatgatggcctctttcacaatcggggagctgatgatgtcgtccacctcctgtgtcaccaccacagcctcgccgaaatattttctgacggtcttaaaaaggtacttgatgtattcactcatattggcggacatcagggctttccagcattcctctatcaatatcatcttacggatacctttgagcctgcgcatcttggcgatgaaagtttccataatgatcagtgtcaccactggaagaagcactttgttgctgctgatattgtccagttcgaatacgatgaaccgtttgcctgtcaggtccagttccttgtcggagttcagcaggaagtcataatctccgccccggtagaacggttccagaacgttcaaaaaaccgtcaatgtcaaaatccttctcacgcacctttttctcttcaatcattcttctgtagtcatcggcgacaaactcatagaaaccgttgaagtccggtctgatgttccggttctccgaaatctttcggatataggcgttcactgctccggaaagagcgacctcctccgaacgtttcggcgactcgtcctcccgtttccacaaggtcagtatcagcgtgttgatactgtcacgcttctccacatcgaattttccggattcggtgtagaacgggttgaaggatatcggattgtcctcttcatacgtgatgtaaatcccgtccttcccgttggtacggtcatggatcatcctgcacagcccctggtagctgtttccagtgtccaccagcaggatatgcgctccctgttcgtagtattggcggacaaggtggttggtgaaaaaggattttccgctgcccgaaggcccaagaatgaacttatttctgttggtgatgattcctcgcttcatgggcaggtcggaaatatccacatgcaccggtatcccgttctggcggtctgccagccggatgccgaacggactgggcgagctcctgtaattggtctctccggcaaagaggcatacggcctgttccaggaaggtataaaaggattcttcagatggaaagtcgcctgcatttccggggattcccgcccaatagatgaccggtgtgtcaatggtgttataccttggcgtgcattccatcatggccagctggctgcccgtgtcgttcctgatgcggcggaactcttccgcatcctccgcccaggcgatgacgttgcagtggcatctgacgggaagcactcctttggtatgtgcctcatcaagatacatctccgtccactcctggttaatggcattgctccggctgtattttgacaacgagagcatattgcgcgagtttttctccatcatctgcaggatttcctgtgcgtcgtcgatgaacacgtattgcgaatatatgtggttgcatgacagcagcagtcctacgggtgcggcaaaggagaggcggcagtcgctgcggtccgtggacatcctctcgtagcgcatgtccgtggaaagtctgccgggcaggtcttccgtatcggaaagggtatgcaggcagaggcgtttgtcaccgatgcgcatcctgccgggcttgaggcagatgtcctgcaatacggcggtctcatccttcagcgagagggaaaagtatttttccaccagtccgggacgttccttcgtaccggtgatttcgtctgtttccagacggcgaagccttatatgtccggaatcattcataatacgctcgaactgttccaccgcctcaagaaagcgggcggcagcatccttgtcggttatctctttgggcaacaggaatccccggcaaagggtattgaagtcactcttccgacggctgcgttcgcgggttgtcttcgtcaggaacaggtagcatttgtgattcaggtaaggtctttcattgaaatgcagctcatagctgcgtgtcaagaagctctgttctccgtcatcggtcttcggacggtaggtttccttgacgaaccagtcctgtttgcagacgacactatgttccggcaataccttcatggctttgatccaggaggagtgcatggcctcatactcgtctgccgttaccgtgtacagttcgggcagttccacttcgaaagccacggtcaggtctgcatccttgctcacgatacagccgttttctaccgatagcagggggaatctgcgttccagcgtttccgcctttaatacatttctcatgattgttgtttttttcttcttgtgaataatctgaaaactctcttgcggtgaatcagatagcgtggatgtcgtttttcagccagcagcttcatcagcccgtgttcaccgtaacgggcattcaaacggaatatcacccacaccaacaggctgccggacaggattccgaaggataagcatatccattggtccacccccgtcaggtaaagaaagactaccataaggagcaccatcgcaagccctccggcaaagacgaacaggtattgcgacttgagtcctttgaactcgacggggttgccggcacctttgtttaccggatattccataggctttagaggaagaaggaacgtaagatggtggcggctacgatcagaaagatacaggcaaagaaccagctggcggcggttttcgaagtgtcaggatctccgctggaaaatttgccataggtcttgataccgcctaccagaccaagcaccgcaccgatggcatagcatagtttggtggcgggatcgaaatacgaggtcatgaggctggttgcctcgttgatacccgcaaggccctggccctgcgcaaaggtgtttgcggcgatgaccgcacacatcacagaaaaaaggattcttcttttcattgtcgaatcgtttgggtaagacataaatttgaattcgacaacaaagataaatggggataatacgctatgattcagaggtgtcatcagatgtcatcaaatgtcatcagatgtctttgccgtacaacggatgaaaaagaaaaaacaggtttcctccactttggaagaatgcctgttgcatgttttcgttaaatgggtacatcatataaaaaatcccatatactttaacgcatacaggattttccgaacatgataaatattgccttttcagactagattcctccagtcagtaacatgtttgctttctttcctctctcttttcaaaggcaacgcattcccttccttatccacatacttccccatcagttcctcaatcagcttcttgttctccacctgggaggagaacagttcaaacatgtccgtttcccggatggaatgcagtgtcatggccgccctgtatgatttgttctcgtccgagccggcgccattcaggttaagcagcacgtcgcctacattgagcaggtcagcaggagtaaccatcggagcaatggcttccgtttcgggagagcggctgtccagttcctcctgttcatctttcagcattctcatctcctccaaaggcagtttgcattccacttcatcttccggaatatccttatccgctccgataaaatcacttccggtttccagttgctggctcatgtaaggggcgacggtcttcccggcattctcgtccagatagacaaagcgggtagctcccatcacatcctgtgcatttcccggttcaccgttgtctttttctgcttgtggccgattgcgaggagtacaaagcagatcacagattttacctattctctctttttgtttccataccttatataacagataagcggtacagccgaaccgtattgataaataaactatttcttccattctattggcttttgagttgcttcttgattatatatttcattgatgatatgctgatacctttccagatggtctgacagtacacttcctaaaaacatggggacagacatttccggtgcaatgaccggcaatactttggcaacagttctgtacaatgtatcgttaatataggtctgccttcttgctcccgacagtttcactttcagaaaccggctccggtattcatctgaatcagccgctccatccggtgctttttttatttgctgtctggaagaaccgcttttcttctcctgtttctccgaacaaggtccagcctgactttttgtttccggctcctcttccggaggaaccgttctttccaaagcggtcacatctcctgccatcatgcgtttcaatgcctcctcatccacttggtaatccgttcttcttttggtagtcataattgtttttattgaagtttcagtatggtttctatttccgctgccagcaggtccagactgcttcctttcattgcggaggaagatggagggaacaaagtgctgcggaacagaggccctttcattccggagtcttttttgtaacgttctgcactgggaatgacggtttccagtaccggcaatttcagcgaacggaaaatttcagtatagccgttatacaggtctttggaaacacgtttgtccatccggttccaaaacatatggataccacgcaagggtacatccttatgccggtgcatgtattcccggatggcaaggacaaaagacatgctgctccgcattgccattctttcctgcgtgatgggggtgaatacataatccatattgattacggactggaatacaccgggcacatttacggtacccggaaggtcaaaaaggacaagatcataatccagctccgatttttcaagaaagcgtccggccgtttcccgggcttcttccggagtggagttcaggatgctgtaggctttcctaccgcttgctccgaactgttccaccagctggttttgcagatgcacgttcttctcaatgtttcccacttcccagttccgcatggtactgatgctgtgctgtggataatcacaatccaccaccagtacgttataccccttcaggtaatggaagtaactggcgagcaataccgtgaacgtggattttcccacaccgcctttctggttgctcaaagcgacaaataaaggttctttcttcataggcttgaatttagagtgtataatttgtttcatatctgtccggattttttcgtttcatcacacggcaatgcatccgttggtatacggcaatgacgcattgtttgccggtttgcatgaatacattgcataccatattgcaccagtgtaataccggttgccgatgggcattgccatataaggtgcattgcattcatgcaatatggggttcaatgtatcccatactgcattgcacggatgcaatgtattccgtcatgcaggattgtcgtgcagcatatatggcattgcacatatatggatgatgccgcattcacaccatgcaccacctgtggcaggcaagcaataccccttacaggacaatgtttcaatgtatgccctcatgcactgtgccaaaagtagcggctatttttgaaacttccaccaacatttcccctacctgacatcagatgtcatcagatgtcatcaaatgtcatatcaaacgctgtttaccaatcggttatcactgtctaattttgcaaaatcggaatcagacgatggaaaagaactgacttcgtcggatcacagcgttccgtgaacgtcgcgcagcaatccgacgaaggagggttctctgttcaagcgaacagagcaagttgtgttttcgtccgacaaaaagtcttttgtccgacaaaaacaactagcccggctaaaagccgggggaatccgctccaaagtcgcggattccggaagagaaaaaagtacaaaccaaaaatctcatgtgcatggagaaaacaacagggacaaggacgggcagaaagcccaagagtgatccggcggaccgcaagtacagcttccgcctgaacgccgaggagaacacaagatttgaaaaattgctggcggattcgggagccggggaccgcacgctgttcatcaagaaatccatcttttcgggacagattaaagttgtgaaaatcgacaaggcgacaatggactactacatcaaactgaccgaattccacaggcagtttcaggccgtcggaaacaactacaatcaggttgtccggaccttgaagaacaatttcggggaaaaacgtgcgatggcattgctctacaggttggagaaactgagcatcgaactgatgcttgtatgtaaaaaagtcatggtgctaacccaggaatacgagcggaaatggttgcaaaaataagtcacggaacaagcctttacggagcacttgcctataactacgacaaggtaacggcaggtaccgccgagattctttcgggcaaccgcatgatttccgacagattgggattgcccagtgaggacatacgtctggcattgctctcttttgagaactacctgctggcaaaccgcaatacggagaagcccgtcctgcatatctccctttctccggcaccggaagaccagctgactgatgggcaattggtagagttggcggaacggtatatgcagaaaatgggctatgggaatcagccgtacatagcctacaaacatgccgatacccataatgcccacattcatatcgtcagtgtctgtgtagacggacagggaaaaaagatcagtgacgcctacgagcaccgccgttccatgaccgcctgtcgggaactggaaacggatttcggcttgcgcaacggagcggacacggaaaggcggaatccgaaagcggaactaaaaaaggtggatgcttccttgggggatgtccgccatcaggtaggcaacacccttaaagccgtactggaaagctaccgtttccagactttcggggaatacagcgcactgctttccacactcaacatcgaggcgaaacaggtcaggggggagtacaccggcataccctacaccggcattgtctattctgccacggatgataccggcaaggtggtcagtccgccgttcaagagttcacgtttcggaaaacgcttcgggaatgaactgttggaaaagcggatgttgatgaatctgaaagctctcaaagagggaaaatgggcaccctccatacaggcggacatcgcccgtgccttgcggcaggcggattcacggaaacggtttgtggaactgctggggcaaaaaaatatcgatgtggtgttccgtgagaatgagcggggacgtatctacggtgtcaccttcattgaccacgaccgacgggaagtgttcaacggttcacgcatgggcaaggagttttccgccaatgtgttcaacgactatttcaaatggttggaaaacatacccgaaaaggaacggggcggacattccgctacagaacttcggcagcatcaccgccacgaatccggcagcacgctcgaactggcggcgggcatactttcgatggaaaccaacccgcgtgactatgaggaggaagcctttgcacgccgcatgaagaaaaagaagaagaccggacgcaaacgtggcatttagacaaaacaagtatcaacccatttatatacaattcttatgcagcaggaagacgatttgagggcgcttgccaagatcatggaatttggcagggccgtgagtatttttcttttggtggtacacgtctatgtgtattgttatccgagtatcaccacgtggcacttgaaccttgcggtgatggacaggattctggtgaatttcaataatacgaccgggattttcaactgcattctctggagcaaactgttggcagtgcttctgctggccgtttcctgtctgggtacgcacggagtcaaaggtgaaaagataacctggcctaaaatttatgcggcgctggtggcaggatgcgcactgttctttctaaactggtggttgcttgagctgccattgccgcacgcggcaaataccgcattctatatttttactcttacggcaggctatctcgccctgctgatgtcggggctatggatgagccgcctttacaggcacaacctcatggaagatgtgttcaatatggaaaatgagagtttcatgcaggaaacccgactgatggagaatgagtattcggtaaatctcccaacgagattctattataaaaaacgctggaataacggatttgtcaatattgtcaatattttccgtgcctgcatggttatcgggacaccaggtagcggcaagtcctatgcgatagtcaacagttacatacgccagcttatagccaagggctttgcgatttacatctacgattacaagtttgatgacctgtccaccatagcctataattctttgttgaagaatatggacaagtacgaggtcaagccccggttctatgtcataaatttcgacgatccgcgcaggtctcaccgatgcaatcctatcaatccggaatttatgacggacatttccgatgcgtacgaggcgagctatacgataatgctcaacctcaatcgcacctggattgaaaagcagggtgacttttttgtagaatcccccatcattctgcttgctgcaataatctggtatttgaagatttacaagaacgggatttattgtacgttcccgcatgcggtggaattactgaacaagccttattcggacctgttcaccgtcctgacttcctatccggagttggaaaactacctttctcctttcatggatgcatggaaaggaggggcgcaggatcagctccagggccagattgcttcggcaaaaatcccccttacgcgtatgatttccccacaactatactgggtgatgacaggaaatgatttttcgttggatatcaacaatccgaaagaacccaaattactttgtgtcggcaacaatccggacaggcagaacatctattcggctgcactcggactatataattcccgtattgtcaaacttatcaacaagaaaagacagctcaaatgtgccgtaatcatcgatgagcttcccaccatttatttccgggggcttgacaatctgattgcaacggcacgaagcaacaaggtgggcgtacttttgggttttcaggatttcagccagctgacccgcgattatggtgaaaaggagtccaaggttattcagaacacggtaggaaatatattcagcgggcaggtggtcggagaaaccgcaaagacactttctgaacgcttcggcaaggtgctccagcagcgtcagtccgtttccatcaaccgtcaggatgtttccacttccatcaacacgcagcttgactcgcttatcccggcatccaagattgccaatctgtcgcaaggtacgtttgtcggggctgtggcggataattttggcgagaagatagaacagaaaatattccatgccgaaattgttgtagaccatgcggcggtcagtgcggaagaaaaggcctacaggaaaatccctttcatcaacgaattcaaggacaaggacggtaatgacatcatgatgcagcagattcagcgtaactacgaccagatcaagtcggacgcgcaggccatcatcaacgaagagatgggccgtatcaaaaacgatccggagttatgcaagcgattggggctggataatgaaaaaacatccaagaaggagtaatccttcctctcattaaatatcaagatgaagtgtgtggggggattttcccatcaatttcccccacatattattaggtcggagctctgcaataggggtattcctttcatctacttcccgaactccacgacaatctccgtcacttccccatgtactctccgcacattcagcacccgtgcaggaatcccatggttgaagcagcattggataaattccattccgatgaacactcctgtattgtattcccctgtatcgttcttcgtgtttttgcagaaagttacggttcctttcatcttttcattccttctcttgcggtattgcgcttccttttcaaacatcataaagacttctcctctgacaatctgcacctgttggccttcggtttgtaggaattgcaggtaactttccagcaggtcttccgggcatccgctatgggatagcatgtttcttatcccttgtatctgaatcgaattttccattgctttttatttggctatgattatctttttatccttgatgacaagtgtgtctttcccgccatgattcgtcaggcttacatccttcaagtcaatacggctgttggaaatggaaaactcctgatgaatcgtatcgttccgcaggaagtggatgtcctgtttgtacaggttcggaatggaaaagaacagggctatgattccgcccatgcagcataccatcaacagtgtaaaggcaacaaaccaccgctggtattttctgtcatccaaaaccttcacttcaaccggtgctggctcttcgttgattgttgcctttttctggttgcatatcacgcggcatctcaaattggggaattcatgcaggctgaacaggtctggaatctgttgcaggaattgcaagtattgtttggtttccatctgcacttccagttccatggttacacggatgacacttcttttcattatcttgggttttcctgttgcccccgtgggtttggctacattgacaggacggatgtccgatgcgcctgtgtctacactcatggcaagctccactccggtgtttcctaaagagggggaatccgtaggatggggtccaaaagatgaagaactttctgcaccttcatattccgctatcaggtctgctatttctcgcacctcggttactgccacgttctttgcctctgcattcacaaaggtttccactttggtcttcaccctgtcggtcagaaaggcttttatcttgtcttcgcttttcttatggataagatagcttggatacttcttcgtgaagttccgggctatattttccatataagatatactataatcataatttaaattaattgaaacataaactattgtatcaaccttaaaaacattctgtaacatatgtgttgatttgatattatctaattctttttaaatcgcccattaattgaataaccgtatcaatataaggagcaatctttactatttgaatattatcaatacaatcctttccacctgcaactaaagcaggaacatagccataacattcatctatcttaggcatcgccttcacttcctttattgtattatattcattcaataaaaaccaattttcaagacaactcttattgaaaattactatatttaacaatatgtcaatattttctgatagaattttaaaagttccataccttatattaataaaaacgacgtaatctccaattacatgattcttaacataagcaaaaatatctccaaaaacagttatcataaatggagtcactgtttcataatcatacataggataacattcctctataatatactgatagtcattcggtataatagttctaaacaagccattacaataaatgccaataccagctattctccaaaaagaaattagtttttccgaaaccaaattattgtattgtcggatataatcctcactaaactcttccaattttatagaatttccacttctttctaaaaatttctcaaacatactacttaacaatttctaagttttcaactaaatttacattcatctttatttttttctgctcctcttctgttataggaggagggtctgttattaattttaacaattcattttcaatattaagagaacgacctttttctatacttccccattgtgacccaatggacgaatttattcttttatttcccatttgagtcaccacatcaacatatcctcctgctatctgatcaggattatgtaatgctgctaagccttccaattctgagtcaaccattgcctctatagccttaatatccatatcttcatacaataaaagatactcatcaattttagcattcctatatctatccctaaaatcttcttgaattttcttagatttaggattacgcccatattttttaaaattctccctatttttcagccactcaaatatagtcatattatttattccatcctgctgcatttgcaattgcttcctcatttcaatttcataaaatggatctttttgaaatttcttctttaattgaaatggaggttttacaaaaattacagaaagacttttcttatttgaatcattgctaaccgaatcatctttcctctcggtagaagtttgatatataattgaaacatccgacaccttccacaccttctccctaacctccagattattccttttgataatccccggtgacaaatacagcaccatcatcatcggagagtttcctacactcatatactcttctattttcacacagaagcagtcccagaaccggaaaatgtccgcaatctccacttcgttgtagatgaaatggatttccccgttgtgcatggctccttcgttcagccagtcatagaagaactgttcttcacccttgcactcaaacgcaagcgtaatcaggtctccctcgaccggcagacactcccgattgccgatttcctcgcatacttggatgtggagttgtatgatttttctcagattcgggtcatcatagtgccggatgtggcaccgatagttataatagagtatcggcacctccattcctcttattttcagaatagtttcataaatcatgataatacagtttcaggtgaatgactatggtaataggtcacggctgatccaatagtatgtctgcccgttggactggaacggcttgccggcggcttcgtccagcagttttttcttttccttgaaatattcaatcagcatgtccagctccgcatccgtaatcattttctttttccgcaagtccttgacacggtaaacttcaaagaaaggatagtcggtcgggcaggaggtaaacctttgcaagacctctgataggggcattctcaggaaagtctttctccctaccttgcaatatctgtccctgttgcgctctgaaaggaaatgtctgaccagttttctccttgcacggcgggttgaggcatattccggtgcgttcaggctgtccgtctttacacgtacggtagattcttcggcatctgcctgtaggtagtcgtccggacagtcgcagatatccaccttcgcttgctttttctttttgaccgcttcgtatttatagtcaacgatcagcttggagggtgcttccacatactttctcaaccgtttgaactcctcttcgttgacaagcagataatagtccagtgtggaggacagcgagtccggcagtacgattggctgtgcaggcaggctccaggcaggttcggtatccggaagtacggatagcatggggtgtacccccgactggcggatatggtaataagctgtcattgtcgaatctgtcctatatcggtgtgtacccacttcgtcgaatgcccttgccagactgttgctcagcagggtattgtcaaacttcacttgtatcagcatggaatccacggcggtggtcagtccttccagttccagcgattcgttcttttgcggaaacaccagccatccctgtgtcatgctccgatttggaaagtccagacaataggtgttatggttcacctccgcatattcgttttcatttctgatttgttcgggatatacaatcagttcccgttttttccggctgatgcgtggtgccgagcaatctatcatgttcccgatttgcagcacgaagttgttgaagttatccggttctcctccgtagagctggaagccgatcatgcggcagttgttttttaccagcttgttcaccaaggtggagtctgcccactcgctgttgaaccctttatcgccgatgacaaccaggatattggtttcatctggacatttgttgaattgctccactccgatccgaaggccggaccagctgccgaatcgtccgtatgtaggtttcagttgctcggcattacgtgctttggcggaaaggaaatcaagcagctccatgtagtcgggagtcagtttgcagatggggtctttccggctgtccggttcgttgaaggtaagcacggcaccgaacctgaaagaaaagctgtcgtcattcaccagttgcgattgcagtccttggatggcattcaccacggctggaaaccgttggatggtgttctcttttccttccaggacaaacatgaggtttattttttgcaggtccttctctatcttgtttttgaaagtcccgtaatagattggattgccgttgacattcagcacatagctttcccgtttgtcgatgaccggcatcggaagccgggttttgaagcagaagctcgtgtcattgttccggtaggacagtaccgggctgtagcggatagcaggctggctggccgaaagttgcagtttccgcttcaggtcgttggatgatagcggcaaggtgtctttccgttccctgtctttaaaaacaagcgtgctgtccggcagcgaggttatgtctatatggagctgctgttcgggggcggtcagcaggcgttcgtctatccatccgatgacagcatgccctatgctgtctgcgtcaagctgcggcttgtctgccacgagggtgcatcctttgtcttccgatatttgataaggatatacgacactgtaaaatggaatcttgccagcctcttgtgtcaggtctgtatttttgaacagttttacggagtcgttggcaaaatacgtttttggggtggccaatgccacgctgtcgttcagcatgaccacctgtttgtttttgaatccggtaacaatgtcggtaaagccgctccgggtcagcaacaggtcgttttggttgatccatccgcagtattttgcctgtttccattctttcagtttcccgtttttcagaatggctgggtcgtattgaatgactctgagccagtctccttttcgcttgatgacgagaaatgcgtccatgtatttcacagactgcatctcgttctttccgctcggactcagataggatgttcctgcttcattggcaaagacaatccacggggtatgcttgggcagtgtctggctgcggggagcctttaccccttctatggaatagtttcgcatatattcacggggtacattctttatccgcataaaacggtgtaccggtccgcaggatgccatacagatgatgcacccgcaaatccatcctccttttatgagtgtcgatatgcaattctttttcatgcctcatttgtttttttgttcggaaaagcgttcgtgctgtgttaccatcagctgcatcacacattcgttgctcaggttgtctcccatatcgacgaacacctcgtctataagggttttcctgcgtgctatgattttcagtccttggcaataggaatagaaatcattcttcttgctgttgttgacggttaccgctatgtccggatttccgcaaaggtatttcttcaggatataattgtaatgggtattgaacggcttgccgtccacgatggcttgcaagtgttcacggatgtcattgccgatgatgacaagcacgtctgtcgagtcgttctccgtatattggggaaggatttcaatggtgtgccggaccggatattgggtattctccgtagtcagcagaacctcgtatatgccgggttctgtataggcgtagagtggattctgctcccgcgaatcgacaattccggattctccgaactgccagcgccattctttcgacggaccgtatcctttgaaagatacgatttctccttgaaaggcggttgccggtgctttcatcctgacaagctcgtcgcttccgtaatcatcccggctcctgtgtactgtgatgatctgtttcctttccagtcctccgtccacttgaaggcgcacttggtagcgtcccggtttcttgaacacgtattctccgctccgttcgtgtgatatgtccccgttgccgaattcccaaagccaggagcgtgcgttgcgggtgctgtctgcataatggaccgtttctccggtttccacctctatgggggtcagtgtcatacgcacggtgcggctggaaaagaacagccggatcagtatggcgacaaggatgcacagcagcatggctgcgattacgaacagaatctttctggtataaatttttcccatgtcatttgtttttagttcctgagcgcaagtcttcctcctttttctgcaagcctatctcgcactcctccagattggctttgaacagacttatgttttgtccgatactccatagctgtttcctgtcggacagccacatggcataaaagtcggcaatgtgcatgaacagcttgtatcgcttgtcccagctgttcctttcgtatgtgttccgcaggttgtttatcagataatggatgtcgtcttcttcatactgggcgtaaacgcccggttcaaatgtttctattttacggaacagggagtccaccggcaactggctttccgcttgttcctgctggaaatccttgatgcggttcatcttgatctttacgaactctttctgttcaaacatcttgaaatctgagttccacatgaagattaccagacaacacgctacggttgtcaggaaaaagaacaggaatacataggcatgtcccatgaatatttcccgtttgttcattgtctttctgttgttgtccatggctttccgttttattgtttgttgccgccggaacccacattcaggttacgccttgttttccagttgtcttggatgcactgcatcaggtctttcttcaccatctcttcctggatattcagcagacggatggagtcttttaccccgaggaagatgttgaggttttccagcagctgcctgtaaagcctgcaatctttggtgtccatgccttggacatatttgagcaggttcatcttgcgcgtactgacaacgctttgcaggagcttgtcgtttatttgcggtgaagtgttcatcagtttcatgtactggtagatggagtccatgctgttcgacagggacagctctttggcatagatatggtcatattccagtgcctgctccgtgattcgctttacttctatgccggaggttttcaggaaacaggcaaagatgcttaccgcaaggatggtgcagcatgtcagatagcccgcgaatctcagataggctttccttacttctgtgttgtttttcggtttcatataggatgatgttttatattcataaataggtgctgatacccagataggcgccttgttcggttggggttcccagcctgaaccgggcatcttcctgctggatgatgtagcggatctgtatctccttgtccgagggaaggaacagttctgtcagcgcattcagtattttactgtcggcagcgccgggaaagaagctctccatccgtcgggcggacagtggaccgatttctaccagcatctggtaggtgccgtcggcaaaactgtttcccagaaccatgtcgtctcccagaatgcagcttcccaatttgggaataaggcaggaatccacttccaccacgcatttgtctcctctcttgatatgcacgggcacaccggtcagaatggtcatgcactcgccggctttggagaggctcgctgtaatctgttccatataggccagcatatggataagcatgaccgccagatgggtcggcagcagttccagtacgggccattgaccggaaaagatgcttacgaaatccggatgtacgttcatctcgtcaatgcggcgttccttattctggaaggctaccagcatatggtccagggagatttcgaaaggcttgaagaaacggcgggcgaaaaattcctcttcgcggtggatgcggatttcgtccagcacctgttccttcgatattttctcggactggtaaaggttcttgtggaatatgccttcgggcagctcgtcataaaggcttctcctgttcacataaagatacaggtaatccgtcaggtcataatgggaatattccgggtggatgtcatggatgtctttcgagaatccgcgccggatgtctccccgtctgaatatgagggtacgctctgcatcatacccggcctctttcagtccgctggccaccacttccgccttgaagtcggtatccggcaggttgaatgaatgggaatgttcgtcaaaccgtactattttatcttgttcttccgtcatgtccgttcgcttataggggattagtccagtatgttccagcgtgactcgctcgattctttcggttgtctggagcgttcggcgacaacgatgttttccttgtgcttgccgatatattccagacggctgagggttgtccacaggtcattgaacaggtataggaaacgttccgccgtaaccatcagttggcggatattgtggtggttgtacagcagcccgcaattttccctcagcaggccttcgtaggcaccgggagtgatgccgttccattcgttgaagtatttcagcaggtcctccttgtcttccttgtccatgaaactcaggcatacatacaggcggtgagccaatgtggagaatacattcaggaagtgtagcggtgaatagtattgcccctcgttgcggaaggagaagtagatatcggatatgaacagcatgacatggcggcacagcataccgatgttggtggccaggctggtctgtttttctgcattctccactttggcaaggatgtcaaacgaagctttttctatggaatccacgagttgcccgaatttggtatagtagcctttcaggtccggatggctggacatgcttgtgcatggcgggatgaagtttccgtccacttcacagcggtttccgttcttgcgcaggcggccgatcagcagaaagtgtcttcccagctcgcttccgtcggtctgtccgctcggcagcacgctcaacgcatatttgggtaaggcattgggctggcgtggactgatttccttctcgttcggaatacccgaaggaagatgctcgaaagggtctgccatcagtatgacatcccaccgcttgtccttttcttcttcctcttctgtagggatatggaaactggcggtgagttcgtcatcctcaccggcatcataatctatcaggtaacctccggaagtaagggcgtggcaacgtttcaatcggacttccaaggtgcctgtaacgagttccgtaatgctgaaatcgccggaaaccggttctcctttcttgaatggcaggagtccgtaggtattgcggttcagatgaaacgactggtattcgcacaaccggtccgtaaagtggtcttcctgttgggtgaaatgccctttgttgacgggcattccgtccgcccagtttaccagcggatattttttcttttggctctgttttcctatcataatgtttctatttaatattcgttatactttataagttcgtttgccacacgcttggctatgattacatcgtgtcttttcagcttgttgccggcaagtgtaacgtcggggtctatatagcgccgtctcttgaaaaaggacggtttggtatagaatacccattcgtaataggctcctccttcattcttatatacgatgggcgaagacggtgatttgaggttgcagtcgtcaatcatgcgctggaaccactgcccgaagatgacatcctcggatgccttgccggttatgcgttccgatgcggggtcatccaccctgcggaatatgtccacatccattacgatgctccgttcacggttgatgtacaaggtatccgagtcatattcctccgaatatttccatactttataaatttcaatgggtatgtcgaaatagctgttcaccgtttgggaatacaggagtggaaatgcaaagggcagcaggcaggtggaggcccagatgccgtactggagttcgttgcagaggttgaacactacggaaaagagtccggctcccagaagcatgaccgtaaccgtcagcaggcattggatgccgaaagaaggcatttccttgcttgacgcgaacactttgcgaaggatgagccggttgtaatatccggcagtccagtacaggatgaccagcaggatgtaggcataaggcatgaagttatagtccatgaatccggacaggccgggcagggcaaggattatgccgcacagcagcagatacgcaatcagttttttgttgttgagcagtttgttcttgcgtgcgataaaataggccgcgattccgaaaatcacggtcagcagcggcatcagcaggtacgatgaaatgagatgttgggtaactgggttcataagtatggtatttatgctttattgtattctatgaatatccggtagttgaatgtgtccggcgaacaggccgagagtttggtacgcagattgtcttttatctgtttttcctgcgaaggctcatccagtttcgttccaagaatcagatggacttctttggttcggatcagtccttcgtgcggcatcgggctgatttccaccccgttccggatttctgtccgcaccagcagttctccgagttcttttttgcagaagctggctatgtcgttctgtgtcaggacacggccgtgcgaaatgaaggcgtatttgtagatgtcaatccgttctctgttttggggggcttgtttcccgccgtaggtggtactgaccagagccagtgtcttcgggtccaggtaagtggtggcattgggggacaggtttacgcctgcctgtatccggtttcctacctcacagttggttgtccagtatttgacggtaatctgccccttgccggacaattcgtcaatcataaggtaataaggtgtttccctgaactcgttcatgttgtccgctgtctgtttcatttgcgccatcagctgctccatctggatggtaagtgcctgtagcttgatgcttgatacggcattgaaggcatgggtctcgtcatccagcaggtcggacagatagccgagcagctccttggcggaacgggagtcgaaacgctcgcatcctcctttgcggatggagtaggttccatagctttccgtggaatcctttgcggaatagaggagttcatggtagttctttccgtcagaatccttcacgctgtgtacggacagaagggattcgtagctgcccgtgcgcaagggtatcaccctgaaagtttcctcaagggtggtcgtctgttcgtgaagcgtcttgttctctacaggcacgatgttgatgccggcatgaagttcttcaaggacttccgttgtgaaatgggcggggaactgtatcttcacccataccagcttgtcctgcatcttctccagaacggcctctttgaaacaggaccgcagggtgtccggaaggtttttcctgcaggaaccgtcgagtggaaaggactgcgataccttcagaaaatgtttgctgtaaatatccatgacttccttgtctatgacggacattacgtcatagtcttggaaaaaggcacgggttggttctttctgtatggttgtcttttcatggattcccccttccatcacgactgtcttcccttctacggaccattccgtacaggggagcaggagcagatattcatagctctccgtaaggttgggaaaatctagatagaacgaaaagtcttcaaggtcggaaatggattcatccaccgccattcctaaccagacggtacgcggagacatccttgtctctgcacgggcaatcatggtcttctccaaggtaggggctatccggtagagaaggtcgtcgcagaccatatatttcacgtcggctttgtgcagcagggtatcgcaggcgggataaaacgatacgcttccggtcgatagcttccgggtaagcgagtcgctctcgtaatacatgcccgattcccgggttatcaggtaacacggttctatgggataggcgtgtacgatgccgtgtgcgggaaagggtgaggtaaggatgtccggggtaaggattcgggcggtcttttccagcagccttgtctcgatggcggtaaaatcctctcccagcatatatatctcgttggacaatgcttccagcaggagcttgacaaccgggtcgaagttttccgccttttttattccccagaaagccgcagcgtatttcagcatacggtttctgatttgctctttattgtatttttctgtactcataatcctttcatcgggttgaaatcggtcctaaatagattacataatagaaacaccgtttttctccggtatgtaccagggttccatatacatatacttgtacacgtttctttacggcgggagcatcaaatacattgtcctgtcgggtggtgtcatcaatgatgacacgtacatttacacccgtaagccgcttctcgtgccgggtaattgccttggttatgtattccgagaattgtccttcccaacgggtgtgtgagacaatgctttcaaagtcgagaaaaaagatctcacagccgaactccttgtcaaaggcatgttcgccgggagccgtactgatcagcagttcgataaactggtcgatggactcgatttccgagcaggatgcaagacggctgttttccacatcctcgctgagcaaggcttcaaaatccaggggcaatttgcaaaactttgtttccatacttgtcagtgccattcgttttcaaattcttcgtctatgaattttagtgttcttgcggcaaacagaaggacgatgctgctggaattggagatacggtcaaccttgcgttgcagacggatgcagttcccttccacaaagcgcaaggcaaatgccgcttgttggtcgggttgctccttcaggtagatccgtatttcgccgtcttcatgggagtggctgtatgcggcccatctcaacagctcgtcacccggcatcccgctgagggtacaggtgacgaatccgccgtatgcctcaccttcaggcaatccgtcacggtctgtattccgcttgaattgcaggtcgaactcttcaatgctgtatgtctcatggcagacggacagccgcatcacgtagcggtcatccggcattgaggattttttgtttctgaacaatgaagtgaaccagttcatgattataagtttaagtgacacgaatcgccggtctccatttcccggaagtggatgaatagtgaggtacggctctctttggttgttgaatgcacattgaaatcaaggcattttgctcccttgaaacggatgatctctttgggagtaccgggcaggccggaagtgttcatcacctctccgtccttcaggattcttgaattgaacatccattccaagagttcctctgtaggaaatccggcaatgcttacccgtattttaccgccgtaggtcttcccggttacctttccgttaggagtggtttctttccggaagtcatactcgtagcccagcaggtcgtatgcctgcacttcttcatgctccgagggttcggctgtccagaacttgatatacgattgtgcactcatatccttatgttattttattcttcttcactcatcagattggtttgcagcatggcggtcagggtccgttcctcgttcatgcgtgattcaacgaacagtaccgtgtcttggctgtccagatgcttgcgtacataggctcgcaggtaggctttgaatgcctgtacctttgtccggtattcctctaagggaagggcaaagatatcttgcgtcccgacccgttccagaccgtatctctccagttcttcttcaaatgacttttttgattgatcattggagattgtataaattattaataccttatactctttcataaacaatgaaattaaaaaaataaatagggtgtccagtttgatgttccagcttttagttcaaaaaagatatgatgcaagttccaaagtgctgataatcatatctctttaaaatatattgattcaatgaattagctatgcttttttgtatgttaaaattgtacctaaaaacaatagtgttatagttaataatcaatatcttaagttgttaaatcaataccaaaaacgagagcgtagaactggacaccctaaaaaataaagcaaatcctaataatacaataaaaggagtaaatatgaaaagatatgcccatacattagaactatgttcataaatttttctttccataattcgttcatttctatgtttataccgataataaaaatagagactactccataataaaatcataataatgaaaaccaccaaaaacacattacttggatttttttgtggtgaatatcccattataatataatagtatataattgcaatatctgccaaatagaataataagactgtagacataataaatggaacatgtatatttaaatacatacttgtgtccatatatcgagtcaatacttgaattttataaaacaaatattctaagattttatgcataactttattcattaaaatatccaaagccatctgtagctgtatccaccaaatagtaaatagaactaatagcaaatccccatggtcccaatatacctatataggtaaatcccacatctaatgctgctttaacaaatttcttttccaatgttcttccatcttctacaaatattaaggaaacagaataaccagcagaagcatacgaactccagtttccaagcattttcataccttttaaatatttagtcccggtttttccaattgcttgagcctctttaagtaactgctgctttttatcgagtgaattaaactgcttccaagaataaccatgaaaacttcttattccataatctattatttcagttttcgcacctaacccaataccaaaagctccaattcctgtattaatattatcaagaatttccttattaaagcccactccatctgtaatgtcaaaatcttgtttaattcctttctcatgtatataagaacgaatcgtttttgaatcactcaaaagaatatttccttttgaatctgtagcttctatataaataaaataattaccaccttcctgattcaaatacacattaaccttaccttgttcttttggaaaagttacagaccggtttcccacagcaacagttatggttccattaccattatcataagttattctttcaattatatcttcagtagtgtatcccatgctcaaaaagatgcgctctggactatcatctatagcttgataaaaaagagggtgtaactcacaactgctccattgcacattaccatctgtaatcctgaaagcctgtgctggcatatacacaggacaggtatatccaatacccttgacataacctgtatatggaactcctattgattttagaaactcaaaatcctctagagttattattctattattcagaatatcgcccattactttacccaccgattatcaaattcaataccattcacgcttacactctctggagatagaatcagacttgttgacaatccttgtcccaaagcctctataacccgtctcagattgacacaatatgcattcgtaaacgccacctcaaacacgattccggacgttccagtcttgaacagaactgccccgttctttttcacccacggtttcacagcccatccgtagatgttgcttttcaccgtctgcgaaagggttatcatgattcgtcctccacgcacttcgccttccggttggttctttaggttatctactggctggtgaaaacctattttgaactgttccactgcatattcgtcgccgtcaacgctgaatatgacattcacgttgctgtccacttgcggaaaattaaaaagtcccataacgctgctgtttttaaaacacccactgattttcaaactcttctgtaccgaatgccagtttctgtgcctgtacggtcagtttggtcgcaatatagcttttgccctgccggatatagctgatttccatatccacacaggtcgctttctcaaagagtatcttttcgagtgtggagccttggttgtcatggactacgatggctccgctctggtatttacgggcatccagcatccactggatcatgtcacggttgggaagatgagggtaggttacataaaacgtgccgccttttacctcggtctgtgcctgtcctttgatatctatcccttgggcaaatccgaattcgcaaccgatgagctggtagctgtccttgtacatgtcggtcagtgaggaggcagccaggttgcctatctttaagaatacggtatatccaaacatagtgtacttgattattggtgaatattccaggttaattcattctgttcgtccagacctacctccagactttttcctttgcccagctcctcgttgatgataagccgtgaaatcggtctgcgcagatagttacggattacaccggccacttggcgggcaccgtatttgggtgtgaatcctttgtgtgcaagcatcttacgggcatcatcggtgatggttatgccgataccctgcttgtccagaagttttctgactccgttgaactgtatgtcgaatattttcaggagtatgtcttcgcggatgggggagaacggaacgatttcagacaggcgtgccagaaactccggacggaaatactgccccatcacctccatgatctgggtggtggacggaacattgccggactcaagttgcttggtcagccactcgcttcctacattggatgtgaacagcacgatggagttggagaaatccccttccttgcccagacggtcatgcagttttccctcgtccatgatttgcaggaaaatgtcatatacggacgggtgcgctttctctatttcatcaaaaaggacaacggcgtatggctgttgccgtattttattgaccagcatgccgccttcctcatatcccacatatcccggaggcgctccgtacagcagggcggcggagtgttcttccttgaactcggacatgtcgaaacggatcatggatttctcgtcattgaacagggcttccgccagtgctttggcaagttcggtcttgccggtaccggtgggtcccagcaggaagaaggagccgatgggctgtcccggcttgttcatgccgctacgggattccaggatggcatccgtcaatgtcttcagggcctggtcctgtccgacgacgcgtcgcctcagataatcttccatattgagtagccgttccttttcctgcgactgtatcttgccgatagggatgcctgtcttgctggcgacaacggcggctacctcatagatacccacctcctctattttcttctctgcaaattggaggaggacgttcaatgcgtttctcagatagccggtcagttcttcatactcctgcaattcatggatatccgcttcatcgggtatgactcctaaaaggatggggcttaatttgttgtgcattacgaaaagcagcgttttcagttcttcggtcttttcctgaaggtccttttcgtccttttctatttcatccagcccggatagcagggtctccacattcttctttcctgtttcattgaccatcttgatggcggagagcgtcatgtccagcagaccgatggcggaatcaggcagacggcggtctttgatataccgtttggcaagacggacacattcggctacggcttcgttgctgattcttacatgatggtagtccacgtattgtttctgcacggagtgtagcatctggatagcggactttatgtccggttcgcttacctgtatgacctcgaaacggcggctgaaagcatggtccggctcgatgattttgcggtattcgtcaatggtggtggcgccgatgacggtcaggtcgccgtgcgacagttcggatttcaatacatttcccgcaccggtatttccttgtcggttgtccagcaatacatggatttcgtcaataaacaggattgcattgtcgatattccgcaattctttcaggatgtttttcaggcggtcctcgatttcccccttgtaggtggctcccgcaatcagggaggcgttgtccagttcaaatacacgggtttcttccagaaacgagggcactttatggctgactatctcccaggcaagtccgtaaaccagtgctgtctttcctactccggcatcaccgacaatcaggacattggacttgctccggcttcccagtatctccatgaccatacggttttcacggtcgcggttgatgaccggatgcagcttgttggccgcatcttcggttagatccacacagtatttgcccaagaaggaggatgaggcggaagtcggggcataggacttctccgtagtggcagaaggacatgccggctgcccgttacctatatatatggaatggatatccttttccagaatggggaaagacctgagctggtcgctggaaaaagcgacaccgggctttgccagtgccaatagcacacagatgggattgatgtcgaacagcccgaactggattcgtgcatcgtctgcggcacggaaaacggcgtcaatccgttccgaaggcttgatttcggacaactgggtggatttcgggcattgttcgatatacacgtccgcccattcctccagatagcctaaatccttgcctatacttattataaaatctcttaaccctacatctttatgaagtagagccttcaacaaatgcgagggtgtataacactcgttcgcattttcacgagccactgcaagtgctatgttaagcgcaatttttacagaatcatcaagattgatgaaaccaactcctgtttccataatcgtaagatttaaaaattgcgcaggagaacattgcaaatataaggcaaaaaaaataattcggctattgttggcagtgttttttttatgcttatgggcatattttcggcaaaaacaagaaaaaatcatcaaaagttctttgtagttttcagaaaatgccatatattgggcgcagaaattgaaggacaaagataggactgtagcaggcctcctttgaccggatatttcaaaatcaacttattttttaatttaaaactttgagaatatggcatttaaagcgtcatttaagttttcggactcaagagagtttgatgtactgacctggagagttaagttcaatcgtgatgtggaccccaaaggccgtccggcatctgacatttatggtggcacaatctatgtggaaatcgaatcaactcccgataccattgtgctggataagatgttcaagcagtaccagcccgtaaacggaaacatcgtcttcaagaaagcggatgaagatgccaaaatgaaggaattggtgttcgaaaatggttatgtggtggattacgaagaggcactgaatgtggctaacccttatccgatgacaatcaagttcgccatttctgcacagaccgtgaagatggacgaggctacatttgtacaggattggccggaaaacaactaatggttgtttcctaatcaaagttttaaggtgccggaatataccaattccggttatttcggcaccaaaaaacataccgaccagtcggattatttatttaaaatcatagtttaagatagtatgggagcaagttttctgaatttggtggctactaaagtaaccgtgaaaggagaagaacagaaattcgtttcactgcatctccgtcagggtttcaaccggcatcacaccttcactgtggtggtgaattatctgtcgcctaacaatacgttccaacagaccccggaaaaattcatcggctacatcggggagacagccagcatttcatttgtccataggcagacgggtgaaagttatgacttcgagggaatcatcactcaagtggaaatggttggaagcatgggcgagacaggcggagtggccattcacggaacaagccctacgatactgtatgagaacaacaggacactcgattcttggatggatcagtccctctctaccataataaaggaggtgacgcaggagtatggaaaggtcaatttggtttccaatcccaagtatgcggcgcccataccctacatggcgcagtataacgagagtgtctttgactttatgaatcgcctttcggctctttatggggagtggttctattatgacgggacgaaagtgtatttcggcaagcctgacagggacaatacggagaagattgtttatgacatggatttggaggaggtacgtctggttgccaatctggtaccgggtaaatccgcaagatacgattatgtagcgcaggagaacaaacagcataatgcggatacgcctgccaaaccggatggcatgaacgaccttcagtctattgcacacagctgctctgagaaggcatatactgcaaaaacgacctcggctgccgacccccatgtaacggacaaggcggaactggacgaacagatgaggattgtaaagaatgcgtctggtgccaatcttctgaacatcaaaggcataggaaagacttgccggataaggattggtgaaatcatcgatgtttctttccctgacaggatgaaactgcctcctttaggcaagttccgtattgtcgggattgagcatgaggtacgccgtgacggacattactccaatagttttgtcggtgtgccggacggtacggtacatattcctgttcccgatgtgaagcgaccgttggcgttgccggaactggctacggtgaaggaaaacaacgacgacaagggacagggacgtgtgaaagtggctttcgactggcagaaaaacggcaagacaaccaattggatcagggtgcagactcctaatgcgggagtaagtggtgcggtttccaagaatcgcggatgggtatttgttccggaagtcggcgatcaggttatggtaagctacgagcatggcaacccggaccgcccctatgttacgggatcggtgttccattccggttcaggtaaaggaggggacaaggacaacaaggtcaagagcattatcacacgcagcggcaatgccatcgttttcgacgatgagacgggaagcatcgttattaccgaccagacgggaaaacagctgatcatattggatggcacggatgccattaccgtcatggcgaaaagaagcattacccttaccaacgaggcggaatcggtcatcgtaatggatgataagtcgataggcttgcaggccgataccattgctctcgaaggcaggaaaagtgtaacattgctgtccggcaacgaatgtatggtgctcagcagcgaaaagagtataattagcagcagcggtaccaatatcaaacaggaggcggcaaaggattacgatgttgctgcaaagaacggaacggtcaacggtgtaaatctgatgatagagggaaagggaaacgtaacggtttcgggaggaatagtaaagtttaactcataattcggttggctatgggagcatctgcatctgtgatacaggaatattacaaagcagtcgattactgggcggacatagtcggcaacagggactggaaactgtctgtatggattgtcgggcagaatgatgtggacttggtggacaggtttctggaaatagaacgttctccggtagggcagttcgatgacatattctttcgttttgatacgccgtacaggggggatgacgaggaatacactgaacagctctggcaggaatatgcgggttggttttcagaaaaggttgaggagaagtatgatattctcagggctctgaggcacgacgggctgctgaaggaagaatacattcctgatgtgtcggttgagcatacggcgggcaacttgtggagagagatgttgcgtttcaaggcatgtatctcccggttggatgatgcctttttctgtctgtactttcctccggaacaggaaagggggtattcccggacaggatggttcggcaatgtgctgaaagaaggtgtcccgcagggaatccggatgacaaccattgacttgaaaaagaacaggagtatccggctgggtgagtctcgggaagtggtttgcatacgcccgcagttcgatatggcggcggctttgcataaccggatggcacggtcggatagcggtaacgacctgattgcacctgaaaatcggttcaagcagcaggttacggttgtcatggattctacacaaaagcaggattggaaattattggacagagaaatccgaaaactgttggatattgcacaggaaataaaggatacgaatatccggatttccgctctgcttatcgcatccgaggcatgttatgctatcagggaatataagcatagcatgaaatacagcgacgaaaccgtccgggaggcggaaaaggcgatgcagggcggtgaaacggcaggatatagttattggaaaatggctgtttccatgaaagcggccattctgacagccgggaaaaaacgggaggaagcggttgccttgtatgacatgatggctaaaaaagccgtcatgcaaaaggacccttattatgtcatggaaggctatcgcatgtgtggtttcctgcgctatgaggatggaaagatggaacaggctttcgaatattttttgcttgccctggcaggaggcagctacctttctgccgaaatcaggcggagttccacgttcgtttatgcggcgtatctggctcttcatacaggaaggctggttcgtgctccgattgatgtcgggatattggaacggcagctctgcgaatggattggggaggattggaaggaactggtggacaatccggatatgcagcaggcgaaggccagaagaaggggaagttttttcagttgagcgagatttaattaatatatattttaaatttaaaattgaataagtatggatcttggtaattatggaatcggcggaaacgaagtgaagattgacgcttccgaaggtattgcggaaattccacaaaatcgaaccttattggtggaacagctgacgaaggatgagccggtggctcccgaagtggttgccggtctgaccaacattgacgaagtctttgcacatttccggccggaaatagatatcgagttcgcggatgcggacggtgctcccgtagaggaaaatttccgtttccacaatgtcggtgatttttctgtcaggaaaatgacggaacagagttcattcttgtccggcctgaatgcggaaaagcagtttgcggacaggatggagaagtcgttgcgttccaacaaggtgctgcaacgggtgctggaaaatccggagacacgtggagcgtttgtcaatgcgatttctgccattttggacgatttgaagaacaatgagaagtctaaccccactaatgaatgatagttatgagcgaacagaatacacaaagagaagcagccgtacagcagcaacaggctgtggcgcagtccagaaatctgaacgctgaattgcagattctggctaagtttggcggtttcaatgtcttggaatcttccgtggacggcatacagaacatgaatccggagcgcaaggcacggcggaacatattcctttccgaccccgaacgggcggctgagcgcaaggaactggaaaaacggcttgagatgtgggtcgatatgttgaaaggcaacaaatccatcagcgagatggtggaactgtgccagaagaagtctgcggcggtgtccggtctgctatcccagaaccagctgaaagcggtggaagaggtcaggcagttggagaagtcctaccgcacggtcatgctcttctacaagaatacggattccgacaagatcaagaatatctccattgtgaacgcttcgatgagccagcttaccgatttggacaactccttctttatcgatgccattgctaacgagcttcgtgcgaattatgaccgtttggacttgcgtaccaactattccctgctggttatcccgggatatttgggttccaacaaggttgttgaaaaatgggcaaagattgcgcatgacaacaaggtgatgatttacacggatttcgctgatctggaaaaaccggatgatgtcattgaaatgttctttgattccaatctttcgggaggcgatgtgtacaagtccaacgtatgtatgacctgcaactatctggtaggacggggacgctatgcggaactgggcgaaaccgaagacttgctgattcctccttctgcggcattggccggcagtgtgtacaagacggtaatggcacaggttaccgccggtaagaagtatggttccatgagcgaggtggacggggttgctttcaacctgaaaaaaagcgagatttccgaaatcgagaagattggcctgattccgatggtgaaggaatacggcaaggtgatggctttctctgccaagacattgttcaacggggacaacttgggattgcagacctattccgtagtccgtgtgttcgattgggtaacgaaagtgctgatggatttcctcaaccgccgtgcctttgagaactggaacagcaaggcggaaagggatttgcgtggtcagatcagcaagtttttggatagcatacagggtcccggacgcttgattgagaaattcaagattcttcgtttcgagcgcgatccgaagcagaaagaccgtattttcctcgacattcacctgactccttatttcccggcaaagagttttgtcatcaagttggaaggtacaaaaggggatgacgagaacgactggaacagcgactatgcacaggatgcataggtaagtccttacagggacagccggagtgtgccggttggaacacccggttgtctctttttcacattctaaaaaattctcaccatgtca

SEQ ID NO: 252 - DNA, 99810 bp, Bacteroides thetaiotaomicron
  source 1..99810: mol_type = genomic DNA
tatctatacctgtaacaatgcttacgcagatatttttcagactgattttggataacgcctacaacttatgggtatgatactgcgtattgtctcaagtcgcattgtggggtaaggggatgttgtaggcagaagtgggtgtttctgcctcaatttatctgataattcagtaatgagaggacgtgtacacgcaagaaggacgttgaagggcttagttgcggatttgaggcaggtaagaaaatacaaagaattaacagcaaccgagaaactgaaataccgtatcgcagtgaaaatgacggcagccgactacttccgcctgctgacacgatcgcatgaggcgggcgtatcaccaagcgagtacatgagggaatgtttccgtaacggtcatgtgaaagaacggctgtcggaggaacatgccggatacatccgccaactctgcggcatggctaacaatctcaaccagcttgcgcgtaaggcaaacgccggaggcttccacgatgaacggtgggactgcaaggtggcagtggcaaggattcatgaacttataaccaagatagggatatgatggcgaaaatcgtaaaaggaagcgacttcaagggtgcggtggattacatcatcgacaagaagaaggatacgcagatagtagcaagcgaaggcttgtttatggaaaatctggaaactatcgccatgagtttcaatgcccagtcacggatgaacgataaggtgacaaaacctgtcggacatatcgcgttgagtttttccaaagaggatgagttacggctgacgaaccgtatcatggcaggcatcgcgcttgaatatatggaacggatgggaatcaagaatacgcagttcttcatcgcccagcatttcgacaaggagcatccgcacgtgcatattgctttcaaccgcatagacaacaacggcaataccatatcggacaggcacgagcgtctgcgcagtacccgcatctgcaaggaattgaccttgaaatacggcttgcatatggctggcggaaaggacaatgtcaaacgcaaccgcctgaaagagccagacaggacgaaatatgcgctttacgacatcatcaaaatggaagtcggcagatgcggcaactggaacgtgcttatcgccaacctgaaacggcagggagtggaagtacatttcaagcataaggggcagaccagcgaggtgcagggtgttgtattctccatgaatggctaccatttcaacggctccaaagtggacaggcgtttcagttattccaagattgacgcggctttgcagcacaacagatgcagggaacgtatgggaataacagccggaatatatgaaacggctacaccaagcgcaccgtccggcacggcacaaagcgagttgttcaacggctcttggggattgctaaaaagcagtggctcatcttataacactgctgatgcggaagccaatcaggaaatggtggatatacttcgcagaaggaagaaagttaagcgcaagagaggtgttgggttctaatattctgtactaatccaattctcacgacacttgcgctctatattcattcggagtgtaacctacctctttcttgaacagtcgggtaaaatgttgcgggtactgaaaaccgagattataggcgatttcattaacggtgtcgtctgtagatgcaagttccgtcttggctatttcaatagacttgtcatgaatgaaatgcagggcggttgaacctgtttcttttttcaataaatcactgaaatagttgggcgagaggcagagcttgtctgcacaatactgtacagtgggcaagcctatccgtttagcagccccatcatggaagtattcgtcaagcaaccgctcaaatcttgcgaggatgtctcggttttggttgtcgcgtgtgatgaactgacggtcatagaaacgtgtgcagtaatcaaggaacgtcttgatgctgtctgtgatgaggttcttgctgtgacggtgtatcggatggttcaattcatattgaatcttgtggaagcaatccatgatgatttgccgttcttccacactaaggtgcaatgcctcgtttgtctcgtaggaaaagaacgaatattcacgcattatccgcccgagaggtgtattccgcagcaggtcgggatggaacataagcaggtagccatctggttggaactgcatgccgtcatcttccgcaccgaacacctgtccgggcgcgataaatatcagtgtgcataattattcctaagtctgtgaaaccggaacgcatgaagcagaatctcgacatattagacttcaccctgtcggccgacgacatggcacggataaagacgctggataccgacaagcctttcttactcggctcgcacgaagatccagaaatcgtaaaatggttcatgcagtacaaaaacgcctgaacatcaacaaccatatttcgatagccgctatcgactatattaagaagttattcgtatatgcctttattgtaatccgtcatgtactgagtaaatgttttgcctgtttgctgtttgaagaagcgcatgagatggctcggatcagagaaattgaaatcatccgccatttcactgacagtgcggttggagaatagcaattcgttcttcagttcctcaagcagacgttgttttatcaaatgggtagctgatactccgaattgggcttttactgagttattgagtgtgatgcgactgacatgaagcatgtctgcatattcctgcacccgctggtgggtgcggatattctgttccaacaagtccttgaaccgaaaagcgaaattgtttttagcaatttcagcgggcaagcaataggcggcagcgtatgtacgattgataatcagcaaaagataatatagtaaggaaacaatgatattgtacgtatcggacactggattcatcagctcatacttaatctttccgagcagccgcatatattccttcatttcgtcatgtgtggcattgatgtaaggcggcgtatctgtctggtaacaatacaaaaggcgaaaaacgaagaacttgtcggcgataaaagtacgcatgaaatcttcgcggaatataaggaacgtgtaatccaacgccgtctcatctacatgccactcttgttgctgatggggtgaaagcaggagaaccatgccgtcgcgcagttcaatcttgcggaagttcagtagcaaatatccgtttgccttacggaaaaagtagaagctgaagaagtctgtcttaaaccgcttgttttctgtcagcacaagtccgatgtccttgtttatggcagtattgatgtaaaaatccacgccgcagcgtgtcttgttgaacggtacgctgaccagtcgatcagggttgattatctcgtccatatccttgtcgtttttgcaaagataataatttcatttatcaaaatggcataattaccgttttttcaggcatagatgtttcgccggattcttccgaactttgcacccgtaatcaataacaagacatatagtcatgaaaaagacatctacagtacaattggtgcgcaatgccaccttgaaaatcaggtatgcgggacacaccatgctaattgaccccgttttagccgacaaaggcactttgatatcggccctcggtgtgaataaaacaccgagggtacacctcaccattcctattcaggatattatcggaggcgtggacatggtgctcctgacccacaatcacatcgaccattacgagccgagtgtccccacacatttgcccaaagaaattcctttctacgttcagccccaggacgcggacgccatcagaaacgacggatttacaaatgtgatacccatcgaagaaataaaaacaatagacggcatatccatttaccgcacgaccggacatcatggtttcgggcagatcgggcagatgatgggacctgtatcaggttatgtgctaaaagccgagggcttcccgaccgtttatataatgggtgactgccgatgggaagcatgtatccgagacaccgtggaacggttcaatcctgactatatcgtggtaaactccggaggtgcaatctttcccgaattttccaaaacggacggtcctatcatccccgacgagaacgaagtgatgcagatacttgacgaattgccttcgcatatcaagctgatagccgtacacatggatgccatcgaccattgccagaccacccgtgcaattctgcgcaatgaggcaacgcatcacgaagccgacatgagccggctgattatcccggaggacggagaaacagttgtgttatgagtgtctgcattaaatccctgataaaaaacatgaacatagtggtagggtgcactataggatgcccttactgctatgcccgtaacaactgccgccgtttccacattaccgacgacttttccgtgcctgaatacatggaacgaaaactgcgcatcatcgatacgtcccgtcctcatgtgtggctcatgacaggaatgagcgatttctccgattggaagcctgaatggaacgcagaaattttcgagcggatcagcagcaatccccagcacgcctatatctttctgacgaagcgccctgacaaaatcagtttctcctctgacgacgagaacgtatggatgggcgtgaccgttacgcgcagttccgagaaaaggaggattgatgatttgaaaaagaatatcaaagcacgacactaccatgtcacgtttgaacctctcttcgatgatatcggcgagattgatttcgagggaattgactggattgtcataggcacagagaccggaaaccgaaaaggaaagtcatattcgcgccccgaatgggtgcttagcattgcagaacaggcaaaggctcatggcataccggtgttcatgaaagaggatttgctgccgattatgggcgacgaaagaatgattcaggaattgccggaacaatttaccagacgaatacaatgaatatggatacaataaaggaaatagatgtaaagagtgtaatgaccaaatcctctctgccggtgggaggatattcggtcaacccttatgtagggtgtccccacgcctgcaggtattgctacgcatcgttcatgaaacggttcaccgggcacaccgagccgtggggtacgtttttagatgtaaaaaactggaagccgataacgaatcctcataaatacgacggtgaacgtgttgtaatagggtctgtgacggacggttacaatccgtatgaagaagaattccaccgtacccgaaggctgctcgaagagctgcgaggaagcgatgccgagattatgatatgcacaaagtccgatcttgtccttcgcgatctcgacctgttgaagagttttcccaaagtgactgtgtcatggtctgtcaatacgctcgacgagcagttctgcgcagatatggacaacgccgtaagcattgaacgccgtctgaaagcgatgcgtcagacatacgaggcaggtatccgcaccgtatgcttcgtctcgcccatattccccagaataacagacgtaaaggcaataatagaggaggtaaaagattatgctgatttaatctggcttgaaaacctgaatttacgcgggcagttcaaaggcgggataatgacgtatatccgtgagaagtatcctgacctcataccgctttacgaggaaatttacaataaaaaaaggcttgaatactggcaggcattggagcaggacatttcaaattacgccaaggagcagggcttcccgtatcgtataaacgatctgccatacggacgctcggaaaaaggcaaacctgtcatcgtaaactacttctaccacgaaaaaatacgattgacaaaatgaggctatgccggactgatgcagaaaagttgtagcgcggataaaagcaccatgtatgtggataatatccggcaatcttccgagcgtatgcgggagatgctcaacacgctgctggatttcttccgtctggacaacggcaaggagcaacccaacctttccccttgcaggatttccgcaatcacgcatattcttgaaacggagttcatgcccattgccatgaacaaggggctgactttgatagtggagagccacaccgatgcggtggttttgaccgacaaggaacgtatcctgcaaatcggcaacaacttgttgtcaaacgccatcaagttcacggataacggtagtgtatcattggcagcggattatgataacggtttgctgaaacttatcgttgaagataccggtacgggcatgaccgaagatgagcaacaacgagtattcggtgcatttgaacgtctttcaaatgccgccgcaaaagacggcttcggattaggcttcctgcaaccagccgttatccaacagccgggttaaatgcgtcctccctatctcggccgtcccttgcaggacgacacagcggtctttctcctggagctttcttaattcctccagtgaagccgccattttctccgccattgttgccataaccgtttttatttagattctgattattttcgtgcaaatactcgtttttagacacgtgtaaatactcgtttttaattatgtgcatttactcgtatttgttgcaaaaatacaatatttgttccgataatcagctactaatgaagtctttttttacttgttgtatcgtcgaaacggcctttcccgtgagcttcgccacgttccggatcgagtagcctttctttaacaaggcgatcgcctcccggtattcctctttcctctgttcggccgttttccggcttcccggcttccgtcccagcctgccccctttctggatgtacaactcccgtccgctattaaggcggtcgatgatcccctggcgttcgatcgcggccagttcccccaacagggtagtgatcagagaggacaaggggtttaccgtcttgtccggccgtaacgtttccaggttcaggttttgaatatacacgcatattttatgcgtgtgcagcgtatcgagtgactttaggatctccagggttgaacgccccaggcgtgagatctcggtcagcaacaacatatccacccggttctgcggatctgtgcagtattccaggcaacggcttaaaaccgggcgttcgatattggcctttcgtccgcttatcttttcctcaaagaccgccgtcacctcgtacccccgtccggctgcgaacctctccagatcgacaacctgccgttcggtcgattgcctggccgactgcgagcttacacgtgaataaataaccacattcatcccttttgcttttgttcttccttatctattgttttaatcaccttatccacctctttcaaggaggcattatttccggatctatccaaaaaagaaattcgctaattaacctataattactatctttgcattgtaatgcttggtaaagcctctgttatcaaaacacgtaaccaagtcaaggatatacccgttcatcaagaacgggtttttcttttgcgacagcccattcataagacaaaggatattataacaggtcagtaatcacagccgccggaatatccagctttgagaaagcgaacatctttttccccagatcctttaacgaggctccgatatggtacacgtccgtttcatcaacgatcaggaaacggtcgtgactgtcccggtacgtcctgatgtcgataggtgggtactggctgttatgcctgtcaagatcaagttggagttgctgcgtgatacgctgggtgtaaatggtggccgagacaccgacgctgcgtttactcaacatgagcaagaccgtttcgtccacatagttgtcgataagcacgatcgaacgcctggccgactttaccagatcggtagcgaacttgtacgcatcgaaaatctggccgttataaaaaatgccttcgaccgggggcaaggcagtacgcacaaaaaaatctatcttctcggtatgttgagcgacagtcctttcaagttctgacaaacgtttattaatggaatacccttttaaaagatagtcctttaaaaccttattcgcccattgcctaaataaaatacctcttttactattgacacgaaacccaatggatatgatcgcatccaaattgtaataagtcagattgcgcatcacttgccgtttgccttcctgtcgaactgttcggaaatcccgaacagttgaactttcctctaattctttctgatcatatatgttttttatatgctcgcttatatttgctttgctggattgaaaaagatccacaatttgcgcctgtgtcagccaaacggtttcatcttccagcctcacttccaacctgaccgcttcatccggctggtataatatgatttctccctgttccattacttatttaccttttcttaattcatcaagcctctgcatcgcaccgctgaacttctcactaaacatcatatcatcgggcaaaacaaaccaggtgggaatacctctcgactgtggattacctatacattcatcttgcccgttctgtttgcggtaatcgtcccattcactataagcgatgttccaacgaatacctaatttataggtattttcccatttaataatagccagtgaataggccggatcatctttgccgtcataaatcacttctacaacttcaaccacccctttaggggaatttataaacttcggatttttatacgaataagtgctcatgtcttttattttttattcatagcacacaaagatactcaaaacaaatatatacatatatacatacgtatgattaacgtataaaaacatttatggttattctaatctttgattaattccggtacagaaacaaaacgtaccgaaagacggaaacaggatttatttcggtacgcttccccgatcggtacaaaaaacacgcaaaaaacgaaaatactacttttagtcttttagtatattagtattttgactatatgttgcggacatgacaaccatttaaaaaactgaatttatgagcaaagcaaaagtaatctccgtattgaatcacaaggggggagtaggaaagaccacaaccacgatcaacctgggcggtgcgttacgtcaaaaagggtacaaggttcttttgatcgaccttgacgggcaggccaacctgaccgaatcgctgggcttctctgcggagcttccccaaacgatctacggtgcgatgaaaggcgaatacgacctgccgatctacgagcataaggacggccttagcgtcgttccctcctgcctggatctctcggccgttgaaacggagttaatcaacgaggccggacgggagcttatcttagcccaccttatcaagggccaaaaggagaaattcgattatatcctgatcgactgtcccccctcgctgtcgctgctcacgcttaacgcactgacggcctcggatcggttgattatcccggttcaggctcaattcctggcaatgcgtggaatggccaaacttatgcaggtcgtccacaaggtgcagcaacgtttgaactcggatctttcgatagccggggttctgataacccagtacgacggaagaaagaacctgaacaagagcgtttcggaactggtacaggaaacattccagggcaaagtgttcagcacccatatacgcaacgccattacgctggccgaagccccgacacaagggcaggatatttttcactatgcccccaaatctgccggggcagaggactacgaaaaggtatgtaacgaactgctaacagaaataaagtaaccatatggcaaagaagaacgatttaaaaaacagtatgtcggccgggctgaccgggggattagacagcctgatccaatccacggccgggcaaaaagaggctcaaaagccgaagaaagcgaaaaccgtgcattgtaattttgtcatggacgaaacctatcaccagaacttaaagctgatcgcgatccgcaaaggcgattcgctaaaatcggtattgcaagaggctatatctgactacttggataaaaacagttccctgctataacagcgtatcgggaatatacagggcaaacactccacaaaagaaattctccaggaaaaaggtacgcaaaaagcacccctacacatcaaaaagtatattgaaaatgcgattccctataaagaacccgttggcgggattaatcttgcgtatgtttaacctgccaacgggtacgatattgataaactttttgtttaaggtttaacgtttacgttgctatttgcatcaacccagcctgttgtctctgcatcaaactggatcggattcaacacagcctctccctgatcagtataaccaccaccgaaaatcaacgtgtagatatgacgcttgcccgctacccatgtatctccgaacggaacataaattgttccgtaactatctgctgaacccaacagataacctccggactgctggattttgcaggtgatcgacaggtaacattgatgcgcaccgtcggcttttatcttggtattggtggcttcttcggaaactttccatgctgtcagcttctgtggtatattcagcataggagttttttcggaaatatcggtagctgtggtattactattgacctcgatgaatttgccttgcactacggtaataaaacctcctcctgtagagctttcaggccaatcacccacagcccaacttcccgttccatcggctgtcgcaggcaatgtgtagacgccgcccatttttacattaaaaatcttgatgtcctttatattcacctgcatgttatcgtattcggtctttgctttgaatacgacctgtgacagaatatgcttgaagttaaatttcactactccgttgttcttgtcttttgtctggcctttggctatggcatacatcacgtcgtagttttcatgagcattgataccagatccatactcatcggagcaggaataagttatcttttgagtatccttggtggcttcccacatataactccactgcatggcttcatcaaccgttccgggattgaatgcgtaaaagtccaaagcctcggtaggccaataacgaaggtcgctcgcatttttataatcccacttaccattattgtacacgatattcactccgtcatgtccaaaatccgtgtctacctttcccatgaaggcagtaccatccgccgtaaaagcgaacacgtcgaaatcggtgttcttcaagttggtgttggtagtaggggtagccctcgtttccgccgcattacttaacacgttaaaaccaatcgcattccgtgaggaggtttccacattcgcaatctcctcgtctgagcaacccatgagtagagctccaaagattgcccaaagcattactgtactttttttcataaataaaaataaatcaaattgatacatataattaataaactcatattacaacactatatccatattcacatcatcccaatcatcaacgtccacatcaaatcccgcaccgtcacttcccggctcggatggaacctcataatcaaaattcaacaccagatgcacatcaccgacatgccccactaccgggacatcatgcacttggccgctcacgtcctgttccaatacagacatgctgcctgaacggttcttgagatacaaccggaaaacattgggctctccttcaagtgcggaatgtccaaacgtatagaatccgcctataatctgattccgtgaaaccattccatcaaagagcaggctctccgaaagaccggcgggcaaactgtcggcggacatgttaagcgagccggacatgccggaaagagcggcccgcaaatccgccaccctatccagtccccgaagaccgttcacctcatacgtgtagtgacataccatgtttacgggagtcagccgtactatctccgcgcttcctcccggaatgtccttgaggataacttcgtctatatggtcgccacacagccaaggtggggtgacagccattgtccggttatccggcgactgcacatcacgcgtatcggcagtaaaaagcgtgtaactgccgttttctttccaaaccatcccgtcggtatcgtagttgaagcaaattacccggtaatcattctcgggaagctccacttccccatcctctcctccggggaaatcaaatatccacgtgttgctttcatcgtcggtcggataaaatacgaccctcatgccttcaggcttgtcatgattggaaatcttggtccagtcgaatattacccgcaccgtggcaaagtgcggatgatcgtaacataaatccttatgctcacaagccgtcagtcctatccataaaaatatgaacaccagactaaagcgtatccgtatcactgcctgcctcctttcttccggctataattcccccgcccgatcaaccacaccaaagagatacccgccttggtcgggccgaaccagcggcggtttttagtggtctgccatacatagtgaccgtccaaagggatgtactccttgtacgatcctccaaggtagccgattcccaacgtgaaatccacattgaaccgatgtcccacaggtaacgagtagccgtaagccacgcctcccccgtaactccatttatcccccaagtaacctttcccacccaattcgaaatcataggtgacgatctgcccgtacaatccgacatgatgcccggaaaacggtttttccaccgctctccgaccgaaccagcggcgcaactccacatctcccccatagatacgccaataattatgcttccgatcacttttccaccaggcatacatccaattcccggccacagaccagttcttccccaaacagaactcaaccccgatgtcaggtatcaaaacagcgtcataaagcaagtttgttttcaccgccatgcaaaacggccgtttctttaccggagctatgacggtaacggtatcacggatgcacaacgtatcacgtgtatgtatatataccgtatctctgacgggatttatcggatcactatcatagcatattttcaccatcgacgaacgaagtttcggaaaatggaatttatacaaatatgagtatggcctcccccctttcagtcttttcagttctccccccaaataagggctgtcctggttttccaaacggacgatcttctccaacaaacgaaggacatcctccctctccggaacattcacatccgctctcaccatcgttataagtccgttccagtcgcttcccgaaaaatgaaaatccttctccaataccggaatctttatataaggtgatatataccgccacaaaacctctgctcgtttttcagacagccttccattcaacagcccccctccttccggggaagctcctcctattatttgaattttcctgataagacggacggagtcgttcaatgcggaacagattttagcaaaccgctccatctcgttcccattgtcaagtaaacatgtatctatatttacctttccttgatgaaaatagatccttaccgaatcacgcttctcctgagcggatatttctccgcttatactcaacacgagcacgaacaatacacatttaatataaaaaaaacatcttttcgtcatttaatcatttgttaatatgacaatccaaacccaggcttttacaccccctgaatttcaaccgctaaagatatgcacttataaaccaacctccaaagcaaaaaacaagtattttaaacttataaatacttaaaaagacaaccacacaacagctacaacacttaccacagcagccaatcacgcttacacaacaattaaaaacacttaacatcataaagaaaagtacttaaacatacaaaaaaaaaaaaaaaacagttatttttgcaggaaacattatacttaataacacttaaaacaataaaacacatgaaaatcagcacaaaagccgcctcttttctaagttcaataaaaactcaaacttacgacaaaaaagaaagagaaatgataataacgtatcaacaaaaacgagtctttcatctatccctgctcatgctggtcttatgcgcacccatatacatatattcagttccatttcccaatgaacagttttattatattaacagcgtattattcctgtttatcattatgtgcactctcgcttattttaaaaagagagtaaatctgaccacgaccttttccattatactgatagccatacatatcgagatttttatcgaaataatttattgctcaatatgtagcggatatgaatatagttatcaaagagcattgataatgagtaacattactatctctctcttatttaccatgctttccatctgtgcctatatgagtaatatctccatcctattgtcctcccttaccatagcttcctatacaatctgcacacttatcaccgacgaaccgttcctatacagttatctgcctttgatcatcatcatatacaccatgatccccttattaggaagatccttacacagtaatatcagcagcttgctaaaaagtagcaacttgctaaaagaggaagaggaaatgcttttgaaacgtctccaaatgaaaaaggaagaactattcgcgttcgccgagttgttaagcgagaataacccggaagaaaagacaagctccctgttaaacataataggggaacaatccaaagaaaatctttttacagcccttgccgcataccagaaaaaggaaaaaagtaaacttgatacaatcaggagaatatatcccaatttatccccgtccgaattaaacatctgccgtttaatactgcaagacaagaccgtcagccaaatatgcgaattattacatcggagtagcggaaacataaccagccaacgagcgaacatacgtgccaaactcggactgaaaaaaagcgacaatttaaaagaagcattacaagaacgcatgaggctgtatgaagaagaagaacaccggcaagaagagttttcagccatgcgttagggattgcagagtaaagcccacagcctttaggcgaggacttgaaacgtaaagcccgaccgtcccacaggaacgcccaaaagaaaaagaatcccccgaacattcatccgggggacatccaagccgtcacatcaattataatacagattcagatcatccgtgccaatctcctttccgtcccggaaaacaaggcgtaaatcaatcctctctctgttttcattgccacaaagatagacataccggccaacatacgcatcatacttatcaatcagttctaacggtatgaccggcatgggaaaaggatacacctatattgcatatagcggaaaatttgtaagattaccctgtactttataaggcaacatagaaaatctctccgcatgcaattccggtctttttcccagtaatgctgtcaacgaattggcccggacattcccttcggccttcacttctatcggcaccatttgggcattacgttgaataacaaaatccaactcaagacgcgaattgtctgtgttatggtaataaatcggtgacacgcccttacttttcatctgctgcaatacatactgttcagtcattcctcccttgtattccttaaatatgtcgtttttaatcaagacttgggccggatctgtcttgaccatagcacccataagccccaaatcaaccatatagagtttgaaagccgacaggtcttcataaatatcaagcggaagctccggtttggtacatcgaggcactttatacaacaacccggcatttacaagccattgaatggccatctcaaaatcattggctctggcaccttttcgcaaagctccgtaaatgaatttcttgttttctttaaataattgggaaggaatgctgttccataccattcggacacgcggaacctgttctttgggcgcatgttttgagaagtcaagatcatagccttgcaaaatctccgactgtattcttctgacttccagcaaggaatccgtttctacatatttgagtacaacttccggcataccacctacataataatattgccgaaggagatccgtatatttgtcatgcaggaggcttatcgtttcaaaatccccactcataagcaatttacaagcttcttcttctcccttggcgacaagaaactcttcaaagttcataggaaatatattgatgacatttaccttccctacgggataagacacatcctgatgaagggatatccccaaaagtgaacctgccacagctatatgatactccggaacctcctctttaaaatacttcaaagattccagtgcttccgggatatcttgtatctcatcaaggataataagcgtatcacccggagtaatgtcaacggaagtcatcgcacgcagcccccgtaaaattctgtcaacattgaaatcctgagaaaaaagctggcgtgcaaggttattcttacggcataccacataagcctcttttttgtattcaagtttggcaaactcatggagcagccatgttttcccaacttgtcgggcaccatttaaaatcagaggttttctatcctcacggtttttccattctataagttgttgcaaaacaaatcttttcatctacaaacagcatttttatacatgtaaaaacagcgtataatacatttatccgcacttatttaaagcacaaatatactaaaataaacagataatagaagcaatcttatacatttttccgcactttaatcaactccaatggaaagcagtagccaatttaggattgccttctccacgctcgatggccaccagcgtattgatgcccacgcccgccagttcggagaagttccagctgattgaccttcaaactcttcctgcactctttaatcatctttcctagctctttcatattcacaacacattgtgattttagtcagttttcatcctagttcaaagaaaaaaacagccgataaagcaactataatcattgtattcatatagattaacatcatatattcaagttaatctatatatttacatggattatttgtatatttgcaaaaaaggaacaaccatgtggaatgaaatgagcaatccagctgtgctgatgagaatcggccagcgcatcaaagagacacgtatcaggcagcatatcacgcaggaagaactggcaacggcttccggtgtaagccccttgaccgttgcgaacatcgagaagggcaaatcggtatcgctgctgttgttcatcagcgtactccgctcgctcggcctgctggagaacctggagcaactggtaccggaaatccgggtcagcccgatagagctcaaaaaactgcaaggaaagaaacgctaccgtgtacgccatttaaaacaagataaccatgaatgatttgatagtagatgtaaagctatggggagaaagcgtaggctctctctattgggaaaaggaaagcaatgccgccttgttcgactatgaacggaagttcatccgctccggtcttgacatttctcccatcatcatgcccatcagccagtacaggaacaccccctaccggttccttgaaaaccgtaccgactgtttcaaggggttgcccggcctgtttgccgattcactgccggacactttcggaaaccagatcatcaatgaatggtttgccagcaagggattgtccggagaagagattacccctttagacaggctttgctatgtaggcaaacgtggcatgggcgcactggagtttgagccgtcctcgccaatcaacggcatgaacgaatcatcagtgctccatatcgaggaactgactgagcttgccaaatccgtattcacggacagaatggcttttcaggtccaactgcgccaggaaggaagaaacattctggatatactgaaagtgggaacatctgccggaggtgccaagcccaaggccatcatcgcctacaacgatattaccggagaggtacgctccggacaggtaaaagctcctgaaggattcgggtattggctgttgaaatttgatggcggcaaatacagcgaacacacgcagataacggacaatccacaaggaataggaaatatcgaatatgcctatcaccggatggcaaaagcctgcggtatcgatatgatggaatgccggttacttcaggaaaaagagtcatatcactttatgacacgacgttttgaccgtatggaagacggagagaagatccatgtacagacattggccgggcttgcccactatgaccgtgaccaacgccattcatacgaagagatattccgtatcatgcggcagatgaacctcccttatccagagcaggaggaactataccgaagaatggtgttcaacgtcatgagccggaaccatgacgaccatagcaagaacttatctttcctgatggatagacaagggaagtggaaactggccccagcatacgacctctgctactcatacacaccgggcggcaaatggacgaaccgccaccagctgtcactcaacggcaaacaagacaatttcacgatggaagatctgcaaaaggtaggtgagaacatgggtatccggaaacacaaacagattatcgaagagatacaggaaaccgtatcgcattggcatgagactgccaaggattgcggggtcaagccggaacacgccgattttatcggagaaaacctgctcttgttcggcaagcaactgcatacgatccatatgccggacattgccaacgaacaagagcaggctttcatgaaggctatgcgaaatgatgacttcaataccattctgaaactgaagatgagaggatatcagccatcggagaacacactgaaaagcctccagccggatgtatccgccaccaccttcatcgctgccgccaaaatcttccaaatggaagggatgctaaaaagccttcaggacataaaacccgcgcaaagcccgattacaggcggcaataaacgtagcatggaattgggggattagcacacaaactacatcgcgcacaattcaatataacagtaaatatattaattgttatatatcatattttgatttaacaattaatatatttacctttgtaaaatgacaacgaatcacatcacccaagccatggccaatccggaaatcatagtggaactgggcagacgatttaaggaatacaggctaacctataggctcacccaaaaagaggctgccgagaaagccggtgtcagccttatcaccttacgccagtttgagaacgggaaggcctataacatcaatatgggcaactttcttgccctgttacgagtagtggactgtctggaacagatggatgatctgatgccggaaatacctgtttcagcctatacaatggaacgaataatgaataaaaagccgaaaaggataagacatggaaaataatgttgtgagtgttatgttatggggagaagaagtcggaaagctctattgggacgaaagaaacaaaagagccgtcttcaactatcatccggatttcatcaagaaaggagtggaaatcgccccactgaccgcttctgtcaaaggaccggcggcaaagggtatgcccatactcggaaacaaagaaaagacttatcaaggtctcccaccgtttttggcagattcattgcctgatcggtggggtaacatggtcttcgaccaatgggcggcacaaaaccatatccccaagcgcaaactcacaccggtagataaactgtctttcatcgggaaacggggaatgggagcctttgagttcatcccggccactcctggattggaatcctcttccactctccagatagagagtttataccaactggcacgccgtatctttgaggaacgggaggaaatatccgtgcaagatgacgaagcactgcaactgcaaagtatctatgagataggtacatcagccggagggcagcacccgaaagccatcatcgccatcaatgaaacgacacatgatatacgttccggccaagtccctttaccggagggctatacctactacatattgaagtttgcagaaggggacgattttccgttcacgcaaatggaaatggtatattatgagatggcaaaggaagccgggattacgatgatgccttcccgactcattcaaattgagggaaaacatcacttcctgacggagcgttacgataggataaacggagagaagatacatacacagacacttgctgccatgaatccggatgcaacgagctatgaggatttgtttgaagtctgccgaaaactgaacatcccggcaagcgaacagtccgaactctaccgtaggacggtattcaatatcatgggcggcaatgtggatgaccacatcaagaatttctctttcctgatggaaagaaacggcacatggcacatcaccccagcctacgacatgacattcaccaccaatttggacggtgcggcatacgaaaacgcacactccatgagcattgcaggaaaagataacgacatcacggaagatgacctgatgcaatttgccaaacagaacggaataaagaatgcgaaaaggataatcgaagaagtcagccttgccatcagccatttttacgattatgccaccaatcatcaaatcgatgactattggaaagaccgcatcgaagagcatctttccggtttggtatctccgatcatagggaaaaccatgaaacactacctgcccaccattgtcgaaccctacgagacagaggatggctttttggtatcagaaatcaacatcatcgaaaacacccggcatgatttccgtatcgaggccttcataaacggaaagcgacagaaatacattgccgggcgtaaaagcgatttggctgctgaagtcattgccaaaggcagaaacaagatgcccgttgagaacaagaaagaacttgtggaacggttgttactgcctttagctagaagataaaaacagacgaatagcgacactattacattaataaaaagtctgttcttgttcggcaagcaactgcatacgatccaaatccggacattgccaacgaacaagaggaggctttcatgaaggctatgcgaaatgatgacttttcaataccattctggaactgaagatgagaggatatcagccatcggagaacacactgaaaagcctccagccggatatatcctccaccaccttcatcgctgctgtcaaaatcttccaaatggaaggggtactaaaaagccttcaggacataaagtctgcgcaaagcccgattacaagcggtaataaacgtaacatggagcaaacaaatttactattcaattttcagtttttttctatttctatactactgtacgccataaaataacgaagaaacttattcctatatcaattcataatcaataacatacaattcaccaagaatattagggaatgctacagtatcatatatcacctgccctactccattaaaattacccggagatattacagatgctacaacaccatgataagctgtgggagaaaaagaaagatctgctaatccatttatcccaataacatttttctgtacaccagcattattaacattacaaaaaattgcataatgaatagtttgatgtaaatttacagcagcattaggaagatgcacaaaatataatatatctccattattacatttagctaaatcatgataggtatttattttttgtatcatactttctaaagaagctccaaaaggattaactgaaattctttttcctgttgcctgttctataattcctctaactaaattagcacaccctccaccatttgtaggtaaattaacattcaaattctgagtattagtaataaattgtgtaatcaattgtctatcatttatacttatagccatatattataactcatgttctcctactctctcaaaggcttttcggaacctgcctataaaaactgtctctgtaagcttaccccacaaatctaccctataatccccaaaccgctatcatcccttttctgaatgccatggaattttttccgaatacataagttagaagatgaaaaaagattgtattcaaagtttttggttcttttttgaaaaaagaaccgctggccaaaaatccaacggttactttactttcggaaaaatatgcaatgaagtttataggccgaatgaggaacgcagcttcttcatggcattctccacatcaaagaaagacacatccataagatcttctccccatgcttccggaaagtcaagaatggaacgtccgttattaagaaccgcatcacggatggctttcatcacattctgccgagtcggttccagcttgaagaaaaggcaatgcctgactgccattgtaagggtatcatcatctataaagaaacggatggtgacggtcatgtgtacctgcgtccgtttctccagtttcttctttttagtttccagtttggccaaccgggaaacatagaatgaagggatatgtttcccggattcaacgcaagtcttcatcgcttcatgtatttcagcgatgccgtcacgtatatccgtcaagtcggtgcagttggatgcaaccgtataagccgataactttttcatctcaaaagccgtttttatatggcaaaagccctgtttgtgaaacttataatatatgaatctccttatcacctaccttctcgtccgatacgaccaatacctcgtacttcatcctcttgtaattatagactacggcaagcgtattaaagccaccgttatcataccgcctgtcataaacggtatgtacatactcatacatcgcattccccatcatgaactttacggaaacatccgtaaagtaaaatgccaccgcataagccagcgttttctttttatcaaccttttttgttttcataaccatttgtcctttattgttttctgataaaatattcaatggccgaatgaaccaatatataatgtgtgggtgtctgcctgcactgttccgcataaggattatagaactggagagccagcgcatggtataattccggcaattcccgcttgattctcgccgtaagcagccgataggagcattttctaccgtacttcatcagctcacgccatttgtcctgtgttatttccgtgcaattcgtctcgtaaaccataacttccgtttttaagttcaatattccggttggaaagcggaaaggggttgttccctctccgtttattctctaatcaattcaggcaagcttttaccgttataccggttttcagtcctttatccagctgcacggtcaacccacgaacattcacctcttgaatttgagaaagaagcacataaccccattcccattcttgaatatggcaataaccgaaaaaaagccagtcaccgtcttcctgctgttcggcttccgttaccaaccataccaccgaagaaaaaggaaggaaaaaccttgcgatgacttccgcattaagcccctgcccctcttttgagtacaaagggttggcttcaaacacattctttagttgttccgtcactgtaatcatatgtcacatttttaaagggttaaacttctaattttatgcttcagctagatttaaagacctttttttaaaacccctttccgggatgaccttttctttctgccgactttttttttgagctttcatgccccatctgagtttataagccttttttttacggcacacaacaagaaggaaggagggattgagaaaagttttggacgacaaaaaatgttggggacagcgaagccgtccggcgttatttttttcggtacaaagggcgaagaccggaactctttcgtatccatccaccgaaataaatttgccgttcaaaaacaaaggctctcagacggggctatgaaaaaacgtacattaggggaggcagaaaacaaggaaaagggcagtacggaaataaaagaagaataaaatccaacattattcacattgatatataatagccaagtatttcgccatatcaatataaatccaactataatcaaaatcaaacagttatctaatttattggttattaaacatataatacgccaaaacatttattttggagaatataatattaattaaacaaaaaaatggcatcattaaaaataaagtatcgacattcctctatagaaggaaaagcgggaacattgttctatcaagtaattcataatcgtgtagcaaggcagataaattcaggatacaagatttatcctgacgagtgggatattttcaattcccaaataatcataccagcaaagacaggagaaaaccggcatcggtatttggtttctttaaaaaaatgtattgaggaagacacctcacgtctaaaagatattatgataagatttgagaatcttggatacaaatatacggcagacgaaatcattgaatattattccgctcctcctgtgaacgagtactttgtgtcattttgtgagaatctcattgaagaattgagacaaataggtaaaatacgcaccacagaaacttataccactacgctcaatagcttcaagcgattcatgaatttcagaaagaaaggcagagacatccctttcgacaatatagactccaacctgatgatggaatatgaacaatatctaaaatctaatgacatttgtccgaacagtacttcctattacatgagaaacctcagagccatgtataatcgtgccgtagaaaaagaattggttatacagcgatatccgtttaaacatgtatatacgggcatagataaaactgtaaaacgggcagttccggccaaaattatccgacagatacgcgatatggatttaagtcacgactcctctttggaatatgcaagagacctatttatgttcagtttttatacccgagggatgtcatttatagacatggcttatctaaagaaaagtaatttgcaaaacggttttttatcatatcgcagaaaaaagaccaaccaacagctagtaatcaaatgggaaaagcccatgcaagaaatcatagataaatacgataccataggttcttcttatctattgccgatcattctcgacgcaaaaacggatgaacggaaacaatacaagaatgcagcccagctggtgaattcaaaactaaagaaattgggaaaacaaatcggccttcctattccgctgacgagttatgtggcacgtcacgcctgggcttctatcgccagaagcaaaaacattccgttggctaccatcagcgaagctatgggacatgattcagaaagcactacacggatttatcttgcatcgttagacacctccgtagtggataaagcgaacagtattattttaaatacactttaattcacattataaaacagtttacgccataggtttcagcatacgtgcccaatcggcccgctgttattctatggcaattattatttttatttatctgacaaaaaataagttggaattatgttatacaaattgaagttttctttctgagagaaagatttgtaaatgcaaaagtacaaaagataacacaaaaaacactaaaaatcagaagaaaaatattagtcataccataaaaaataagaggtatgattagaaaaaactgattatttgttgagcaaattgattataccaatcttataaatatttgatatacatcaaaataccaatcaccccatttctctcagaaagagaaacaccgaaaataggagaaatttcctatacgaatgccataggaatataatgaacaagtatataccctatactttcagttgtatgacaagatggattcagaaaggaaaaagccccgtgaaagtacaaaattcttgcttgaaaaagattgaataaatgacggttttctccataagagaaatgttttgaatatgcaaaaatacataaattattgaacataatagcataaaacaaagaaaaaccttaatagccacctcgttaaatgtcgtggttacataacaaatgttgagtaaactagattgtatttacagcgaataatccctgtaaatcaattatatatgttaaatatttatgtcctctatttctcttatggagaaaaataggaatgcggcaagataaaagacggcatgaatggttgatatgacagccaaaaaagacataaattactataatacagaccaatacataagttgggatgaactatgggtatatcttgacctgccgtaataactaaaaaacacacgacgaatgagtactcccataaccacaagggaagatctaactagaatccaatggttcgccatgagcgcttataaaaacgagaaaaaggcggaagagatgctcaaaggcaaggatggtctagagtatttcataccgaaacactatgccgtaagggtctatcacggagtgaaatccaaaaggcttgtaccagtcatcccgaatctcgtcttcgtgcatgcttcccgaaaacagatcacggatttcaaaaaaaaatataatttcttacaattcatgatgtgggagaaaagcacgggactgaaatatatcgtggtgccggataagcaaatggagagctttatcaagattgcctcgcagtatgaagaaaacactatttattataaaccggaagagattgacatacggaaaggtacccacatatgtatttacggtggcaagttcaatggagtaaagggcgtattcatgcgggtgaaaggaaaacgtcgccgccgggtggttgtgatgcttgaagggattatgggtatatcggtagaagttcatcccgatttgattgaagtcatcaatgattccgattgtgacaaattttgagagatgacacaaaaaggagatgatgaagttccccttcctcgtggccttacacaaataaaataatatttgaatatatgtatttttggattgtaaattgttcactggcatttttgctttgtgttctctgtgcgggtatcgtcattccccagattctgctaatcgctttccgtaagaaattgttcgactttcccgatgagcggaaggtacatcattgtgcggtgccccgattgggtggtatcgcattcaagccggtagtgtttttcaccatagccctgttgctaggaatcaatatggtgctgggacattcggagatattgtccgaaatcgggaacgacgtgtgctctttggcttttgctttctgctccatcatggtactatatctggttggcatggccgatgacctgatcggtatccgttatcgtgccaagtttgtcatccagattctgtgcggcgtgatgcttattgccggtggggtatatatcaacaacctatacggtgttctgggcatccatgcggtgccgttatggttaggatatcccctgaccatcctgatcgtggtcttcatcatcaatgccatcaacctgattgacggcattgacgggctggcttccgggctatgcagtatcgcctgcctattttatggactgactttctttatgctccatcagtatgtttatgccatgctggcgtttgccacattgggagtgttggtaccattcttctattacaatgttttcgggaacgccaaacacggaaggaagatcttcatgggcgacacaggcagtttgaccatcggcatgatgctctgtttcctcagtctcaaactgaccatgtgcggactagacgataatacaggaaatgtacatccgatggtgctggccttctcacccttgctggttccatgctgtgacgtggtcagggtttacctgcatcgggtacgcaacggaaagaacccgttcctgccggacaagaaccatatccaccataagctgcttgctctcggaataaagcagcgcaataccatgatcatcattgtttccgtgtcaactatattcatactgctcaatattcttctgtccctttatctcaatgtgaactggatcgttttgggtgatatattgatatggactctcgccaacatcaggctgacaaaatctatcgcacaacttcaatcggaacagaaaaccaacaaataaaaatcaataaatatgaaaatcagatacattttatccttattaaccgtggcctttctattgggatcatgtgccacaccgaaagtcgcttatttcacggacctgaaacggggtaccgcagagcaagtcttgaacccgctggaaatccggatacgtccagaagacaagatttccatacaggtcaacagcaaagaccccttattaatgaaccttttcaaccttccgatcatatcccgacagattggtacgacatcaggtacatccaatagtcagggaatatcaggatatacaataaataaggatggggatattgattttcctgtgctgggacatatccatgtggcaggaatgacacgcgcggagatcgcctcgtatataaaagaggaattggtttcaaagaatctcgtgaaagaccccgttgttacagtggagtttatgaacctgaccgtttcagtgttgggcgaggttgccacccccggacgtttcaatatcgaaaaggacaagctgacacttttggaggccttaagcatggccggggaccttaccgtctatgggaaacgggaaaacgtgctggtacaacgggaggaaaacgggaaaaaaaccctgtatcaggtcaacctgaattcgggatatgacctttatgcctctcctgtgtattatttgcagcagaacgatatcgtttatgtggaacccaactcaatgaaagcacggcaggcgaccgtcaacggcaataacgtccgctcagcctctttctggatgtcattggcctcgttgctgacgaccattaccgtgttgattgtaaaataatatagaatcagatatgatgaccgtaaatcaaaagaatataaaaccggggcagcaggatgatttcctgcgaatacaggacctgttatacctgtgcctcgcaagatggaagtggttcgtcttgtctttagcggtaacgatcggtgccgctactgcctatctgttacgcactcctgccgtatatacacgtaccgcttcggtattgatcaaagaggattccaaaggcaagtcggtctcctcggatttggaatccttctcggagttcgggctgtttcaatccggtacaaatgtgaataacgaactcatcacctttcgatcaccgtctttaatgaccgaagtggttaaacggttgcgtctggatatgaattacttcgttcggggaaaattccaccgtcaggtagcctatggactgacattaccggtggatgtaacgataaatgacttgcctgagaatgaatcagccggttttacgttggaaatacagccggacggtacgttatacctatccgactttatacgtaacgggacagatcttgaagaaaaggacgtaaagggaagcttgctcgactccatcactacgccattgggaaaaatcattatccatacaacacccaattacgtgaaaggcgaggcatatacattatatgtaggcaaatccagtctgtataacgccgtcaactcctgctcgtccaatctgtccgtttcattgaacagcgagaaagcgtcagtcatagacttgtcattcaaggataactccacacagcgggcagaagatgtattgagcatgttgatttccgtttataacgagaattgggtgaaggacaaaaaccagatcgctgtcagcacctcaatgttcatcaacgagcgtctgggcgtaatcgaacgggaactgggaaatgtggacgaggatatctcctcttacaagtcagaacatctgttgcccgacgtgcaggcggcatcgagtatgtatatggctcaaagcagtgcggccaacgcgcagatcctgtccctgaacaaccagctttatatgacccgttacatccggaactatttagccaacgatgccaaccgtacccaactgcttccggccaactccggcattgaaagcgccaatattgaatcgcagattgccgaatacaacaagcaactgttgcagcgcaacagtctggttgcgaacagcagcacggaaaatccgctggtcgtggatatggatcaggctctggcatccatgcgtggggcgataatcagatctatcgacaatcagatagtgaccttgaattcgcagataaaaagtttgcggcagacggagcaacagacgacatcacgtatagcggccaacccaacacaggccaagtacctgctttcggtggagcgccaacagaaggtaaaggaagctctttacctattcctgttgcaaaagcgtgaagagaacgaactctcacaggcgttcacggcttataatacccgcattgttaccccgccacacggcagcatgttgccgacatcccctgtgcataaaaatatctttatggtcgcattcgctctggggctgctcattccgatagtcattatcttcatgcgcgagaatatgaatacccgtgtacggggaaggaaagacctggaaaacctgactataccgttcatcggtgaaattccgctgttcacaagaaagaaaaaagggatattaggaaagaaaccgcaggaagtcaaggccgttatcgtcaaggagggcaaccgtgacatcatcaacgaggcattccgcgtattgcgtaccaacctggaatttatgaccggcaaggacaagacttcgaatgtcatcatcatgacctcattcaatccgggcagcggcaaatcgtttctgaccatgaacatcgccgtgagccttgccatcaaaggaaaaaaagtgctggtaatcgacggagacctgcgccacgcctctgcatcatcctatatcgactctcctgacaagggattgagcgactatctgggaggtcgtatcgataatctggatgagatcatcgtacccgatccgaaacataaatctatggatatactacccgtgggaacgattcctcctaacccaacggaattattgttcgacgagcggttaaagcagacaatcgatactgtaagggagcaatatgactatgtgctgatcgactgtccgcccgttgaactggtggccgacacgcaaattattgagaaactggccgaccgtaccgttttcgtagttcgtgcaggattacttgaacggagtatgcttgctgaattggagaaaatctacgaggagaaaaaatacaagaacatgtccctgatcttgaacgggaccgagggaagtggcggtcgctatggataccgttatggctatcgatatggttatcactacggttacggctcaggataccactaaggttccgacggaaaacagggtggggataaatggatgattattaattaaaaaaaataaaatgttttatataaaaatactcgtatcattgtgtggccattcaggaaacgtatatcgctgaaagatagcggtatattcaagaattttaccgactgtcactcgcacattctgccgggtgtggacgacggtgtgcagacgatggaagaagcattggaaatactgcgcctgtatgaagagttgggcataaaatccgtatggcttacaccgcatatcatggaagatatgcccaacaccacactgcacctccgggagcgttacgctgaacttcaagccacctatagcggtccgataaaactgcatctggcctcagagaacatgcttgacaacctcttcgaggaacggttggaaaagaacgatctgctgcccttgggtgaaagcggtgaccatctactggtggaaacctcctactttaaccctccgatgggattgaacaacattctgctccgcatcaaggctaaaggctattatcccattcttgcccatccggaacggtatgtttatatgggtgagtcggattatcaacaattaaaagacatgggagtgaagtttcagttcaatcttccgtcaatagcgggtatgtatggcaaccggattaagaaaaaagccatgctgctattaaaagaaaaggctattactcatataggaacggacattcacaattacaatatatttcaaaagttcatttgtacgagtattacaaaaaatatacaaaactgtttaattgatagtcagactgttatagtttaaatagattataattatcggttattaagacctgtagattctgtttaactttttctctctaggtggatttgcataaaatacatacaaaaaaatccaacaggctggaattcaatggaaattgtaacaatcgacttggagcagatacacacaatctctcttttatccaaaccagtcttaaaataaatcattacacccctatcaagcaataggcttgcaacttcaacataaaacaacaatccatatgtcattaacaaaagttttagttactggtggagcgggattcatcggctccaatttatgtgagtatttattggctcacgactatgatgtaatctgtttggataatttttccacaggtaaacctgaaaacatttttccatttctacaacgatatccgaataagtttaaacttatcgtaggagatatacggaatctgaacgattgtaagaaagctgtagaaaatgtagattacgttatgcatgaaggagcattaggctcagttccacgttctatcaaagatcctataactacaaatgaaactaatatatcgggattcttaaatatgctgacagccgctcgcgatgccaatgtaaagcgttttatatatgcagcaagttcttctacatatggagacagtcagtctcttcccaaagtagaagatgtgattggtaaaccgctttcgccttatgccataacaaagtatgtaaacgagctttacgccgatgtgtttgccaaaacctatggaatggaatgtatcggcttacgatatttcaatgttttcggtcgtcgtcaagatccattcggggcatatgctgcggtgattcctttgttcgttaagaaattcatggctcatgagagtcctgtcattaacggagatggtgaatatagccgcgattttacttatatagacaatgtgattcaaatgaacatgctggctatgaccacgacaaatccgaatgcaaccaaccaagtatacaatactgctttcggagaacgcaccacattaaaccagttggtcggttacttgaaagaatttttgagtgaatttgaccccgaaattgccaacgtgaaaataattcatggtcccaaccgcttgggggatattccccattccttggcatgtattgataaagcaaaatcccttttaggttacaatcctcaatacagtatgcgtgacggtttgaaagaggctgtcaaatggtattggaagaatatttaaagtaataataacagatgaaattatgaatgaaactaaaatttgcgtaattggtcttggttacgtagggctccctttggctcgtcttttctcgacaaagtataaaacgataggttttgacatgaaccaagctcgtgtgactgctttgatggcaggtcatgatgcgacactcgaagtgtcagatgaactactccaatctgcccttgccaatggttttaagtgtactgccaatatagaggaaatccgtgattacaatttttatgtagttgccgttcccactccggtagacaaaaacaacaatccggatttgactccgctttacggtgccagcacaactgttggtaaggtaatctccaaaggggatattgtggtgtatgaatctactgtttatccaggtgttacagaagacgaatgtatcccggttgtggaaaaagtgtccggattgaaatttaatgaagatttctttgctggctatagccctgaacgtataaatccgggagataaacttcatacagtagaaaaaatcaaaaaggttacttccggttctacgcctgaaataggtaagaaagtaaatgaggtatatgcttctgtaattaccgccggtacacatctcgctcctacgatgaaagtagcggaagcagccaaagtaatagaaaactcacagcgtgatatcaatatcgcatttgtgaatgagctatccaagatatttactaaaatgggcattgatacacaggatgtactggaagcagcttctaccaaatggaatttcctgccatttaagcctgggctggttggaggccattgcattggagttgatccgtattatttggctcaatgtgcacaacgtcacggttataatcctgagataatcttagccggtcgccgaatgaacgacggtatgggggaatatgtggccaaccaagttgcgaaattgatgctgaagaaaggaatacaggtgctcaactctcatatcctcatattagggtttacttttaaagaaaactgtcctgatgtgcggaacacaaaggttatagatatttacaatgctttgcgagagtataacgtacatatcaccgtatatgatccttgggccaatcctgatatagttatgcgagaatatggaatctcggtaacgaaccaacatcctttggataagaaattcgatgcggcaattatagctgtagcacacgaacagtttataggctttgatgtaaaaacgttactaaatgctcaacacgtcatattcgatgttaaagctatctttgaaaaaaacgttgtagatggtagactctaatcggattgtctcctttgacatattgaaagggggaggaattttattggtcatccttggtcatatacaaatcccttacatgttgaaaaccgttatttacagttttcacatgccccttttcttttttgtgtcaggctgtttctttcgtccaatcagtttgagagagttttttgcaaaaaagaccagacaattactgattccttgggccttttttgcctttttgttgttcgcatatttgttcgttttgaaacttaacgaaactcataattgggcaaaagcgatctcgctccctgtaacgagtatgtttgatggttttctcggtgatgaaaactcttttattttatttcatgtaatttggtttttaatttgtttgttcgaggtttcattcgtttatttattgatacataaaatcaccccctacaataaagcattaacaatcagcgcattatgtatattattatatggagtaggatattggttaaatgctaataacattgatttgccatattttattgacacaacaatgtctaccttgatttattaccatcttggtttttgcttcatgcggaacaaatggtacggcatgaaggtttcaccgatatactcattattcttgcttattatcgccattgttttcatcgttctatttccctcttacgttgacttaaaatcaaacaattttccattgcatctattgttgctttcaatggtttttattatgaatttttattggtttatcaattcatattttaattcgagaaagctgaaacttattccattggataaaatattgatttggtgtggaattaacagtttggcattattggggctacatatattatttgtagatacattctggatcgtgcgcaataagttacatcttgtaaactacagttggaccatattggaatttgcactcattgttgcaatatgctattttgcgacaaccttaataaaaagatacattccgtctgtattaggaagatcataagcttgctatgaataagacatcgtccgtaaataataaaaaaatattcaagaatacagtggcactttatgcacgtatgttgctgtccatgattgtatcactatatacatcacggatcgtgttaaatgcacttggtgtagatgattatggcatttatggacttgtcggcggtattgttgtcctatttagctttttgaatgtaacgatgagtggagcgacttcacgctttcttacagtcgaacttgccaaaaatgaccctcgacaactccaacaaacattcaatacagcctttatattacatataggaattgcaattatagtcttgtttttggctgaaacggtcggactttggctgttattcgaaaaattgaacattccagatgagagaatgagtgcagctgtttgggtgtatcaattttcaataatttcctcaatggtcagcatcactcaagttccatacaatgcgactcttatttcgcacgaaaaaatggacgtgtatgctattgtggaaattgttggatcactgttgaagttgctgatcgctacacttctacttattacagtatgtgataagctcattttatatggaggacttatgctcttatcttcattcttgattgcaatgacatatcgcatttattgcattaggcattatgacgaatgccggattaattgggaatggaataaggttatcggccgttctctgtttagcttttcaggatggaatctttattccaatatttgctttactactcgtcaacagggaacaaatatgttgcttaatatatttggcagtacagctgttaatgccgcagccggattggcaacaactgtgcaactgatgattgaacaagtatcaaccaatttggtaatggcttcgaggccgcaaattataaagcaatacgcattgaccgatttcaatgccatgatacaattactaaagcaaactacttgtttggcaaatgtgttatatctgttggttgctattccttttatctctgaaatacattatgtaatgaatttatggctcgtggaagttcctccatatacaattgaattctgtattttattgatagtctcaagcttcatatcattgaataataatattatatatattggaatacaagctgtcggacgtttgaaattttattcatttatggcggggacagtatcattatcagtcattccgatactttggttattgtttagtaaaggtatcggcttgacttgggcttttggattgcctatagtgagcacattattgatttatatcgtttgctcatatacactccatcattatgttgaagatttcaaaccgatacgttttttcttcacaacgatggtagtgaatcttttcataagtattccttcttttaccgcaatcctactcatacaacatatcttggttgagtcctttacaagagtgattatcgtggctcttagttcttcaataatattggttgttctgtcctattatgtgctattagacaaagaaaataagaaaaaagtaaaagcattgattttaaacaaattaaaacgatgaataaaaacatacttataattactcctttttttccgccacagactcatgctgcggtatttagggcatttaaacttgtaaaatatcttaaacgtacaggttggaatccgatagtactgacggttaatcgtaattatctatatttagaagatcctgatttgttggacgaagtccaagacgtgcctatttatcaagccaattatatagaaccgacattgcgcggccttagaatgttgcttggaggagaagatacttcactcaaagccattacagccaaagcaaaaactattggtgcacagtcaaaaagcacggatacagtcacctctaacaagcaatctttattcggtaagttttataaatatatactagaccgatggattcaagttcccgaccgctttagattctgggaaagaagtgccgtgaggatgggacgaaaaataattaaagaacatgatatatctatcatatataccacttgcctgccttttacctcaaatagaatcggtatgcgacttaaacatctaaccggagtaaaatgggttgctgatttcagggatcctaccacatacgctaagcgaatgtattctgattattttcctgtttttgccaagcaaaagaaaattgaacaagatacttttaaatacgctgatgctattactggtctgtcgggagcatacctgaatatatttaatgatttatatgagggacgatactcaaataaatcatattttattccaactggagtagatgatgattatttgccttcttttcaaaatagagaaaaagagaattatataatattcgtgggtgaatacctccatgaatataaagataatttcttgaaaatatttgccgaagctgtcaattctaaggaattaaaaggcaagggttgcacccttaaaattgtgggtaataagaatatcaatcaaaaacaaacggaagaatttgtcaatgatttgggaatctgtaacaacgtggaatatatcaatcatgtaccgcagcgtaaattgtatgaattgatagttaatgcaaaagcagcagtacttattcccggacacacggctttatggtggactaatttcgcaaaaatggtcgattatatcgcattacaagtgcctgtattagcaatggtgcccatgactagcgaagcacgaaccgaattgataaaagcaggcataggtatttttatagatactcctcagcaaggtgttactgtcatcaaacaagtatttagcgaaaaatttccaatgacggcaaacaaagaatattgccgccgttacttggcatcgcaacaaacaaaatctttcattgatattttccaaaaaatacaatagagatgcatatagcgtttttaactacagaatatccgatattgggtatgaaatgtggcggaatcggaatttttatcaaacatttgtctcatcttatcgttaagagtgagactggtgtgaaggtatcagttgtgtattggggcaataagtttacagaaactgtgtgggacgatggtatatctgtgatacctataaaccagcctcataagtctccattttcttcttttatcaatagaaggtatctaaataaaaagttaaatctattagtggcaaagattggcatcgacctcgttgaatctatcgactgggagggacctttggctttttgtagtttatctgtaccagtagttacaagattacatggttcaaatgtgtatttcgatcatttgtctggaaacaaaactccatggaacgtacggcttatggaatataatgctttgcgtaattctgatgcctatataggagttagccgacaggctctcgacctgacggataaattattcagtctgtcttcgaataagagaaaatgtgtaatatataatcctgtggatataaacatgccccctctttcatctagtgacatgaacaaaaatacaataacgatactttattgggggacaattgttgagaaaaagggggtacttgatttgcctcttattttcaacaggatatgcgagcaaaacgacaatgtcaaactcattctcatcggacaggatgcagtagtgaatggttcttcgacatgggaaaaatgcaaatctctcttttcaaagcaatcgatcggttgtgtatcgtatttaggtcgcttaccttatgacaagactatgtcatacgctaacagtgccgatatttgcatatttccaagccatgcagaaactttcggtttggtcttactggaggcaatgttactgcggaaggcaattgtttgttccgatatcgattgttttcaagagattataggagacagtaactgtgtttgcaaatgcagggtgaaacgtatcgatgaatttgcagaggctttgcaacggctaatctcgaatcccatttataggtgtgaacaagccgacagggcttatctaaatgcaactgctagattcaacaccaacgagatagtggcacaaaacatcgaattttacaatcgagttataagagatagctccaaacatcatgtagaagaatcctaactcaactgctttattagaaaatttaaacggactttttatttataaaatcacatattcatacgaaggggagttaaggctttttttgtattgccatcttgaagaaagtcaaacatttcagtacaactacgtaaaatatagaaatgcttcattatagtgaaatttctgatagagtataattcctaaacgaagtgattaatttcttaactcttgattcatattattcataaacgccttatgcaaaaagggataagcattattttgcccacacttaatcgggctgattatctggcaagtacagttgattgcttaatagagcaagattttggggagccgtatgaaataattattgtagaccaatcggcagccattgacagtactatgtatagtcgtgcaaaagatagtgatacattgattaagtactatcatgtgactgaatttagagggctacctgaagctcgtaatttcggtgtgcaacacacacaatacgcctacatcctatttctagatgatgatatcgagtgtgactgcaacctgctcaaagagcattacaagttcttgtcacaacctgatatcgcagtagtggcagggggaattacagaaaaatataagaataatcccaaatcgaaaaatgtaggcaagttccatttctatacggcaactccagaacggggattccacattaatcataaagaatatgtagatcatggcggaggtggaaattatagcataaaaaaagacatatttttagaagttggtggtgttgatgaatatttgaattatggagctgctctatatgaagaaaccgaaatatgtttacgagtaaaggaacttggatacaaagttttttttaattatgatgctcatgtatggcacttggctgctgatacaggcggttgcagggttctggatatcaatcgctatattgcttcattagtacataaccgggctttattgattagccgtcatctcaaatggtatcataggccgactgcttacatctatttgttgcgtcttgttgcatcatacgcttttacttaccgcaatcccggactgtttagactttttgcaaaaacttataaagaaggttataaaaaaggaaaactaactcctaaatatactcattatgcaaacatctaacaaacacatttttattgtaacctatgattatccaccaagtaatggtggtattgcaaggctttgttttgaactgaaaaaatatttagagaaaaaaggactgaatgttacagtcatttgtccccaaagtacttctaccgatgcagaggaggataataatgtggtgagattgcatggaagaagaggaatattggagttgcgtacattgaagtatttacgcaaaaaaactgttcccggtgatattgtaattaccgggaattatcatccagagggaatgctgtctctattgtcaaacagagaaacctatatattggcacatggagccgaatatcttgccggaaagagttttttccgacgctgtatttggcctacttatcgacgttttatactaagaaacgcctcttgcgtgattgctaacagtcattatacagagacattagtaaaacattgttctccaaatgctaaaacaatcgctattccgttagcggttgatgcaattcattttcgccctacttgtgaaaaatataaggatggcttgctacacctctgttctatttctcgattggaaaaatttaaaggacatgattttattatccggacgatagcttctttaccggcaaagtataagcaacaagtgcgattgcatctcggaggtaaaggaaaatataagagtgcacttgagcggatggttaccgatttaggattgtcagatattgtatcatttgaaggtttcattgatgataataaactttgcgatttctattcagcctcgcatatattcattctctgtacacgtgaagaagcggataataggaatgtagaaggatacgggcttgtttttgccgaagcgcaagcttgtggaaccgccgttataggtactcgtacaggtggcattcccgatgctgtcgaggagaataatggcggttggttgatacatcaggacgcccacgaagaattggagaatttactcattaagttaatcgacgataaatctcttgctataaatgaaggtcgtaatgcacgtcggcgcatagaagctaaaattacgtgggaacattatgtggaccaaatttgtgatgtcattttatgagtattagtctatatatagccttatattacaacttgttgctgctattagttgtttacatcgctattcaaccggtcagggcagaaacagtaagacagccttatatcaacaaccagatatttagccttgctttactcttgattgtatatgttcatgtaactttccgaccgaccgattatcactactttggagatacttcagcttatgccatggctttccaaaagaaagccttctatggtacggttgctataagagatagagatattggttttgagtatcttacctattggctttcacaactcgtcaatttaaaagggtattggtttgttctttgctcattatatatattgcctgttttctttgctttaaagaaacgattcaaacaacaatatgctgtagcactagtgttgttcgtttgttctttgagtttttggggatacggagtaaatggactgcgtaacggaatagctacatcgttagttatcttctcttttcttgttccaaacaacgatattaaacgaattcctgtttggattatagcatgtcttttccatcaatccgtcatgttgccaattggctgtttcttgctgacccgactttcaaataatcccaaacactacttatacttatggggaacgtttttcctgcttatgcttgttgcacgtgattctttctccactttgttgacaaacattccttggtttgaacaggataaaaggatgtctgaatatttgaatatgtcttataaaggcatggagcaaatgttctctaatattggatttcgctgggacttcattatttatagtttgatacccattatcgcaggagtgaaatatatctatacatattgctacgaagacaaattgtttatccgtttatttaatacttatatagcaagtaatgcgttctggctattgaccattcatgtaccgtataataacagatttgcttatctatcttggtttctttatcctatagtattgatatatcccttgctaaaagataacttaataaataaccagggagaacgaataaaatggattattctatgttattatatgttcacttatgtaatgtggataaaataaaatacaaaacaatagaaaaagatttttatgaaagatttagttactgtatttacaccggtatataataggaagaatttaattggaaatctatatcagagtttgttgtctcaaacctataaaaattttgaatggattattgttgacgatgggagcactgatgatattgatgaaattataaaatcttatcaaaatgaagatcgtatattaattcgtttcatcaaacaagagaatggtggaaaacatagagcaatcaacaatggcgtattacatgcaaaaggagaattattttatattgtagatagtgatgactatttaacaaaagactctatagaacgaatagtttttcattatcaatatataaagaataatgataaatttgctggagtttgtggtatgaaatgctttccagatggttctcgtatagggaaagaggttacatggaaaattttaaaagattcttggattaactattggattataaaaaatataaaaggggatgttgcgtttgtttttaaaacatcagtcctgagaaattatttatttgacgatatacccggagaaaaattttgtgcagaaagtttggttctaaaccgtattggaaaaaattaccttatgttattttttaatgaaaaaatatacatcgcagagtatttatcagacggtttatctgtttcatcaatcaaaaacagaatgaattcacctaattatgccatgagaatttattcagaaatggcatcactagatattccatatttaaaaaaaataaaagctcatataaattactggcgttttgctccttgctctaaattgaaaatgaaaaataaaataaaacaaataggaatttctagttatattatttttatgcctattggctatttgtttcatatgaaagataaaaaaaacaattatatagatattagacatttaaacggattaaaccattaattaaggtattcgttatagtagattcatatcttcctaggaaacttaataattttttatttgtaagtttaagaggtattggaggaaaagttggtattgtgattagatacatattggtgaaaaatctagcaaaaaaatgcggtgataatgttgtaattaaagaaaatgtatatatatctaacatagagaaactagaactgggagataatatcagtattcatccgatgtgttattttgaatgtagcggaggattgatgatcggaaataatgtgtctattgcccattcaagttcaatactaacaagtactcacacttattctgattttaatttacctattaaatataatgaaatcctaaaaaaaacggtagttatccatgatgatgtatggattggttgtggagtgaggattttatgtggagttcacattgatacaagatgtataataggcgcaaatagtttggttaataaaagtgttgactcattctctatttatgggggagttcctgcaaaaaaaataaaatcttttcaatgaaaaaaaagaaattattcaaaataacaaattcagcttattttcaagtccggcaacttcaaggtcaattgaattatttttccgcatatttcgatgtcattgccgttgcccctaaaggagaaggttgggaggaattacagaagcaacaggcacgttgtattccggtaaaaatgtcaagagccataaatccgattttcgatttaataactcttttccaattggtaaaactttttatcaaagagaagccgactattgttcactcgcacacccccaaagctggtcttttgggtatgttagcagcatggatagcacgtgtgccgatccgtatgcacacggtaacaggcttcccattgacgacggctacgggcataaaaaaacaaattcttcgttttacggaacggttaacttacgcttgtgccacaaatgtatatcccaattcacaaaagatgtgtgatattatttgttcaatggggatcggcaatcctaaaaaaatgcttgttatcggtaatggtggttcaaatggaattgatacggcattctattcgcgaaatgctacacaagatattaagatttcaactttcgatttcacgtttggttttgtaggtcgtatattttatgagaaaggaatcaatgaattagtagcttcttttattcgattacagaaagattatcctaacataggattacgtttaatcggctttatggaagaaaacctttatccggttgatgattgggtaaaacaagagattagcacaaattctcacattgagtttgtcggctttcaacaagatgttcgtccctatctaatggggtgtgaggcttttgtttttccctcctatcgtgaaggtttccctaatgttgtcatgcaagctggggccttggaattaccacaaatcgttacagatatcaatggttgtaatgaaataattgttcaaaacaaaaatggaataattgttccaccacaagacgaacacgcattgtataaagccatgaaatattttttggataatcctaatgaggtaaaaagaatggcaaagaatgcaagggcaatgattacatcacgttacgaacgcaataaattttggaaattgatgcttgaagaatactatcggcaaattaaaaatcgaattaaataacatctatgcaaatcatactgttatccggcggttctggtaaacgcctatggccgctttccaataatacacggtcaaaacaatttatcaaactgttgactgcgcccgatggctcgaaagagtcgatggtgcagcgggtggtacggcaattacgagaaaccggcatctgtgattcgattactgtggcaacaagccagtcacaacgggatatcatcatcaaccagcttggagaagagattcctgtagttacggaaccggagcgtcgcgatacattcccggctatcgctctcgcaagctcgtatttggcctacaaacgaaaatgttccaccgatgagattataatcgtcatgccttgcgacccttataccgaaacaggttattttgaaacgattcgcaggatagcggatgcagtgaaaaacaatgtagccgaactagtattgatgggaattaaccccacatatccgtcagcaaaatacggatatgtagtgccagtcaatgatgtacagaacaaaggaatatttcaagtatcacgctttacggaaaagccagatatgataactgccgagaaacttatttcagagggtgctttctggaacggaggcgtattcgcttttcggttggggtatatgacagatattgtaacccgacacatcaaaaccgacactttttcagaaattcgttctcgctatggggaatttccgaaaatcagttttgactacgaagtcgctgaaaaagcgcagtcggtagccgtcgtaccttttgccggagagtggaaagaccttggtacatggaatacgttgactgatgaactatcggaacacaccatgggcaatgttgtcatggatgaagaatccgaaaatacccacgtcatcaacgaacttggactgccaatcatgtgcattggcacacggaatctagttatcgcagcatcaaatgatggaatcctaatttcggacaaagataaaagcgagaacatcaaaacttacgctgactgcctacaacatcggccaatgttcgaagaacgtcgctggggtgaatacaaagttgtcgataccgccgagttttccgacggttacaaatcacttaccaagcaactgaaaatcaaatccggtaagagtatcagctatcaggtacaccgccatcgcgatgaagtctggacgtttatcgacggcgagggagaactggtactcgatgatatcaggtcggttatcagcagaggcgatacgattacaatcaagaaaggtgttaaacatgcagtcagggctatctctgaattgacgttcatcgaggtgcagtccggaaatctacttgcagaagaagacattgaacaatttgactataaatggtaaaatccttcgttaaaacctctgacaaaagaatgaagttggtttacaagaaagttatcgaacctcaattaggcaacctgatatccatattgaaaaagaaatgataatctatagcattgattattatcaacaagatcaagattgtactcaatgtggaaaacattcggaatgtatttgccggtaaaatgataaaatatcactatccatatgtaagtaagtatatataccggacacaggatcttgcgaaagtagcttcgttttcagattctaaaccgcagaaacagcattacgcaaaaattaatgggttggaaaaacttattataaatactggtaatgaaccttttcattgatttttctaatgaaaaagaccatccttcaatacatgaccgatatctatcaggaagatattcccaaacatatccttcaagaaaacaagatacgcctgaattcttttttcctggaacaggaatccgtacagaagaaagggactcagtttatattcagatatgcattctactccgttgagaaaccccgaaagatcacgaagcagcatctattgaaagaatatgcaggggtgcctttggaaaaaaggagcgtacaaccggaacaaatacccgatatgaagcaatatagtgatataatactgtatggagatgccagctctcctgaagcacagcaacagctggcggaatacctccaacaacataattcattaaaagtccagttgtctttttttgacaagagaaatgattccactagcaaggatgaacaagccatcgcatatgcggaactacagaaggcgctatttttttgccaaagaaaaaagatacctctcctgttcgtttccttaaaagggatgatagacgacatccgttttctcaatctgctggaggagagccatgtcgatttcagatgtaccttaattccgcaacactattataaattaaactttttaagtacctgagcaacaaaaagttgctcaggattttgccatgtcagaattttcacttatcttagtgttgcaaaaaaaacaagagaatccgacgatagacatggcgaagatacaaattaaatctgagagactcactccttttgggggattattttcaatcatggagcaatttgactccacattatcatctgtaatcgactcaaccctcggtctaaggtgtagatcgttcggttatcagtacagcgaaatcatccgttctctcatgagtatctacttctgtagcggttcatgtattgaggatgtcactactcatttgatgaaccacctctcgcttcatccgacacttcgcacttgtagctctgatactatcctcagggcgataaaggagttgacgcaagaaaacatttcatacacatcagatatgggcaagacctacgatttcaatacggctgacactctcaatactttattgctcaattgtatatttgcatctggccaactgaaagagggtgagatgtatgatgttgatttcgaccatcagttcatagagacagagaagtatgatgcaaagcctacatacaagaagttccttggttatcgccctggcgtggcggttattggcgatttgatagtcggtatagagaatagcgatggtaacacaaatgttcgtttccatcagaaggacacgctgaagaggttctttgcgagatttgaacagaatgggctcactatcaatcgcttcagagctgattgtggatcatgttccgaggaaatcgtggaggaaatagaaaaacactgcaagtccttctatatccgtgctaaccgctgcagttcgatctacaatgacacctttgctctcaaaggctggaaaactgaggaaatcaatggcattgagtttgaattgaactctatccttgttgagaagtggaaaggtaaggcatatcgacttgtgattcaaagacagaaacggatggatggtgtgcaggatttttgggaaggagaatacacataccgttgtatcctgactaacgactatgattcttccgtaagagaaattgtcgagttctataaccttcgtggaggaaaggaacgtatcttcgatgatatgaacaatggtttcgggtgggacagattgcccaaatccttcatggcagagaacacagtgttccttcttcttacagcacttatccgtaacttttacaaggccattattcaaagacttgacgtaaagaagttcgggctcaatgcaacaagtcgcataaaagcgtttgtcttcaggtttatctctgtaccagccaagtggatcaggacatcaaggcggtatgtgctgaacatctatacctgtaataatgcttacgcagatgttttccagactgattttggataatgcctacaacttatgggaatgatattgtgtattgcctcaagtcacattgtggggtaaggggatattgtaggcagaagtgggtgcttcaagttcaaattatctgcaaattcagtaatgagaggacgtgtaaacgcaataaggacgttcaagggcttagttgcggatttgaggatgtatcgattttccatggttctgcaaggagaatctgcctctgataaaggcagttgtgctatatgaaaagttggaaataagaataaatgtataagatatcaagcttacagattggacttcaatgttgcagcattgaggtttatgagaaacaattctaaatatatttctgtttggcgaaatcttattctaaaaggaactctaaataaaagaatccaccttcagatatctttcttcacttatcctcaaagtatataatccaaacataaatatcagacctattttccctataactgagtaataaaaagattattccccaacaccgtaaacaaagaaataacagaagcactttaaaatggtgtatctaactcacttttttaaggataatatccctgttacagttatctgtagcaggtgatcctttcaaattgggcattagatgcacccttttccttattccaacaaatgcgcctcttgtaacctcaccaattcccaatacatcttcaaaaacatctccagatacaccttcagactcgggaaatagacgaaagacttccagcaaaagaaaggcacatgaatggccgttcattcggaacctccatttctggatagcgtttctttgtccatccaaaataatctctatcgggacagaacaataaacaaaagcataaatatcaggcaaaattgtcccgataaaagaattataacatgactattgaagatgaaatcctccaatacctgcactatcatcctctatcaaacagggttgagataacgcttgggataaccaatcctcccagtggcaggattgtaaaaagactactggccgatgccgtaaccaaaggaatgatagaagtactctaacaatagtagtgccactattttataagcagcactgcaattgttccttaccccagcaaatgcacctcctgtaacctcaccaaccccaaatacatcttcaagaacacctcctgatacaccttcagatccgggaaatagacgaaagacttccgggcaaaagagaggcacgtgaatggccgttcattcggaacctccatttccggatagcgtttcttcgcctggtcaaccgccatcttgttcagtgaagccacgaagttagcctggcgtatcggattccatttcggggtttcaagaatcaccatcccatctttccgctcaggaataaccaaatattcatcctgcacgttacggacgtaatagcacacaaaagacaaggcctcatagacattatcccctacatgaataccgataacccgttcttcaaccggtgtaccggcaaagcattccgcaatctgtttcatggcatacccatgcaacaaggcagcatcagaagccaacagataagccggtgcggtacgctctcctcccttatcgatggcagcaaagacagaaggactccaacagagatggatgagctttcctttttctttctcacgaagggaagcgacacataaacggttatcaaagaccaaacgggcttctttcgtttccggatggaactggaacacgttccgtaccctgtccggcttatggatatccatcatcagatagccctgccaaccggacacgtgctttgtcttcaagacggtttcgctttcctccacatcgaaaagataagacaagagcttttctcgcttacaacatacgaagagagaaagctcgtcctgttctttcatctgctgcatatccaaggaaagaacaaaagccaattgccaaggagtaagctcggaaaagccatgtaattcaatacaagacaacgcatccttctccggtgagtaaacgacatatccccggccacctatctcatatctcaacatgaaatccccctgttcagtgggatgataattctgtaaaacggtctgataattcataaagcaaatatattaagttagtattcatcataatgagaaatcgggaccactcttgcgtttccgtttctttttggacggtatgagatcatcctcttgcgacttcttcccgctgccggtaatgtcaagttccggaatggccataactcccccaccctgcatatagaaagcctcacgatccacccgctcacggaactcccctaccctatcgatatgtggcgagagaccgacagccacaccatcgaaatgcttctggatattctgataagtgagcttacgggaaagatccgcacctttaaagacatgagcattttccacgttttccatataaaaggaaatcccgtatgcgcctttgctgtttacatgttccgtcacacggatcgattcttccgccaaccttttcttaaaatcctcatagcctaaagaagcgttcaatgccttaaacacatggtcatagagataatgcttctgttcatcggcgctcatgccccggccatcaaaacgaatattaccaaaacgatatttctgaggaagtgaaacgtccttcaggtaaaagcctgaatccttgatgccatagacataataggatttgtccttcttggtgaccagacgcatatacaatccttcttgttccaggttccttcggaaatcggatgtactttcggaaaaagagtagatgcggtcaagctgttgtaacagttcatccttgaacaaggggttgaaaaaacctcctttttccagcaatgcgaaaaggttgtcatagctttcatcccccaataggacacgccattcttcattggccaattttatttcttgcaagggtttattcaaagaccggtatgtatcggattgttccaggacagccgataccttatccttgtaattataactacgcatggctttcttcaaggccgcatcgaaataatagttacggtattgcgcctctcccaacgtggttctcttgcctccttccctttccaaaggcaacagaccgtacttctgctccagttcccttgagatcttttcggaacggctgtaattatttccggaaggaatgcttttgccttcttcatcaattgtggtcagcagcacatgcacatggctgtgtgccttgtcggtatttaggacaacggcataacaggactttccgtaccccatcctctcgatatattccccggcaagagaaagccactgttcatcggaaaggctttctcccggatagaggctcagaataaattccgcataaggtagtttcacccggtcattcaactgggagataagtttcatgtaggctggcatggcggccagttcgtcaccagtggaggtgtaaagcacttttccgtttccttccttgaccttggaaagctggtattcaattttccggctcatggacaggtgggatgagaaagaaggttgtatctcggctatcataacaatttccggttaatggtttctacatccgaaaggtattggttaatccgatccaatgaatacaatatattttcatcggacggaagcgtattgatatgtttggcaagctggttgatattggctcctattttacgaagttcatatatcatttgcacatcggttttcgatatgcttctgcctttcaaggcagactctctgataaaggaagaaagggattttccctcttcctttgaacgttgaagaagctgttctttctcggcttccgtcaagcggatctttatacttatatctcgattctctttcatatatacagagtatgtgagtgtaacgaacattggtcggcagctcggctgtcgcaaggttttttgtacccacaaaaacataccttgcattagcaaagatatacaataatactcagctgtgaaacaaaaccagacaaaagtcttgatttcttaatccagattaaccgctcactttgttacaaagtaactacgcacattgtaacaggcgaacggaaagccattagttacaaaatacataattactaattatattattacaaagtatgaacatacatacttaattataagattaagtatgtacatatttatatttatatttatatatgtaattacttatacaattaagtaaaaaagtgtataataaattaattataaaagtatgcaattatttaatttattatttatatatttgcgcacatacttaaaaacgtacattatgggacaaatattaccaggagtagtcgtagcttttgagaatcccaagggcggggtagggaagtctacgctgacagctttgtttgcaggttatattcattcgcagtcaaacgaagaggggggcttatccattgccgtggtggatatcgacgacatgcagaacactatcggaaaattacgtgaggacgaagccgaggacggaatcatgaaaaaggaagaagaatatgaggttatcaatatctcttcctcagagttcatcaaccaactggatttccttcaggacaattacgacattatacttgtcgattttccgggtaacctgaaacaaaacggtgtagttgaaacgctgcacttcgttgacgtgatcatcattcccttcgaaccgaaccagaccgatttaagacctacattgaccttttactataacatctatgaagggattatcgaaagccgtcgaaagattggtaaaaagactaccgtgcgtggtgttatgaaccgtgttcttccgaatgtgctggagttcaaagaaattttgaaaaataaaaaaaccttgcctttcgagttgatgcaaaactacatcaaggattcaagggttgactatcaacgcaatttaagtacgctgagtaaagcgtaccatcatccctgtgatgctttctgtgaagaggtattggaattaatctgtaaccatataggagaataaagctatggcaaccaacaaagaaaggacatcatcagccgccatgagaaaactcttgctgcaaagcgccagtaagaaagagcaggaaatccagcagatcggaagtgttgcggaaagcactatcccccaacctgcgattgagcaccccatccatgaagaggtgaaagaatcggctccagtcaaagaaaccgtccaagaacctcagccggaacaaatggaaaagccggaatccaaaccttccgtgcagtcttctccaaaaacagaagaaagcaaagtctgcggaaaaaaattctcggaatatctggaagagcgaaaattaaagaacaccgaagtaatccggatatccagcgaaacccacagaaagctgaagcagattgctatggccactggattaggaatgcacaacatcgcaaacaacattcttgaagacatattgaccagccataacaaggagattcaagcgatactgaagaagtatatgagcatctgattctactttcggaaaaatatatacgcctgttcgactgcatccgtcgggcaggcgttatttttgcacaccgttttagtgaaggccggcattgaaccgggacacttttacacaactgcggaaaaatccctttgcctattatcctggacaatatgttaaagaattcaaacctctacttgtttccacctcaaaattttttccgaaagtaagaatacggtaacaaaatcatttcttcgttttatttaggtttttagggatttaagtatttgtgggacacttttacacaactaataagggaggttttccgtataatcaactatattattgcaagttagcacttactggcatcttctcgtaaccgggacacttctgcacaactaaccgactattcgggacacttctgcacaactgaacaggaaagtcgggatacttttacacaactagaatctgcattcgggacacttttacacaactaaatcaggaatccgggacacttctgcacaactaaaccggccattcgggacacttttacacaactgggggatcggaaacagccgtagtcgggacacttttacacaactaaatcaagaaacagcacgaaaaaaatgctttggaatcttcatttatagggagttagattcactatctccgtaaaaaaacgtatctttgcatcagtaaacaacaagtgtccgcctatgaaggaaagtaatacacaaaaagagttgagcagagtccccaggactctcagcgagtcttccaacacgaaagtattggaagttctatttgatgcaggcggcactgtcatgtctgacattatcatttacgtggcatcttcacaaatgaaagatctgttcggcgactgctggttctccatcaacgatttttgtgaggtcatggggtatgaacgaaccaagttgcaacgaaaactgaccgagaagcagcttgatttcctgttcagcaaccaacgtccggtatatatcaccgaacagaacggccaaaagatagagcatccgatagagaacacctttgaagcggcgttataccgtttagggacatccaacctcagtgtagcatacgccatgaacggcaagacgcaatataagttcattcaaatactggaccgctttgagataaaggataacttcggcacgaaaaagcgcaccaagcggaattacaacgtgcatctgagcaaagatctgatgaatactttgcttaccgaatacaatctgctggaactgaaagactaccgtaacctgcccaaccgcaaaggctaccgcaagttttatctgaacctggcgaaaatgatttacctgatcaagtataagattgaccaaggacaagcaccttatttcaccgttacggttgaccaacttgccaaggaatttgatgtaacggtaaaggacaaccatgaccggaagaagaaggtgaccagcatcttaaacggtatcaacaaaaagctggagagaaccaaattccaataccagtacatcaaaggaaaaggggagaagtggccctacaccgtacagtttttctttgaccaggaaacattggaatatttcgacgaaaagataaaggcgatactgacctcgcaatatcacgatgcgcttaaatcatgcttcttgttaaacaagaaaggcattcccgtgagcagacattatcaatataaggatttctttaaattgggaaccggcgaatattatcatgaatttaccgcatggctttattctgaagaggacaaggagattaaggagaacatctaccgggatatctatataaaggtagtaggcattcgtccagaagaccttgccgtcaacttaaatccctaaaagttggaacaaaaaccataaaatagtatctttgcagcggattgtcagaaaattggcagcccgctttttacatacgtccgtctgtctaacaaaagagtggcatctatcgttaaggaattaacaacaacaggcgcatgcctgtaccagtatgaaactggtacggggcgtgcctttgttgttggaacgccacgtccatgttagagggtacgtttccgtacccttatataaacataaaacaaattcaatggttcaaacaattgccaccctgatagatgagacgctcatggtaatgggcgcccatcttcacgtgcggatgacagacgaagaaaaggcgtatcttgatgctcatttcgagcttatccatatcaaaaagggagaacacctcgtcaccaggggcgaggaagtatgctacctctattatctggaatccggcatcgtccggttatggtttccggacaaagagaatagagagatttcagcacggtttatccaagccaaagagttcatcaattttttcctttcacatgaagaacaccatgcccactacaatatcaaggcattggagccatgcaagatctggagattgcccaaaaaagatcttcatcagctatatgagttatccatcaatttcaacaagctggccagaatacatttggtaagatccatcaaccgcaaaataataagggaagaggagttttacacactggatgccgaagcgcgttacaaagcgcttttggccaatgaaaaatggctgttacgttcaatacccttaaaagacatagcaagttatatcggcatcacgccacaagcattgagcaacatccgaaagcgcatataaaccaaaccctataagccgggcaggacagttttacacaactaatcctatccggcttttttctgtagaattattccacacctgccggtttacggcacatgtattttttaatgcacattaaataaacacgaaaggccctttaaaagcccttcataaaatttgtcctcccgtatataatctatatgtttggagcgaaaacaacgcgataagcaccttgattcggttctgccgacaggaatccgcgtaaattggaaacaccgtatgagacaaatagaaaaatatataacattaataacctaaagagtaattcccatggaacacatcagactgactgctatcagccttagcctgctgttatgcaccgtaagcgcttttgcgcaacgccattatgagaacatcccggcacttgaattgaactacggcactaacctgttcggcaatgcaggcaactattacaacctgtccttttccagatacatcaaccggacaagctattggaaagccgggtttagctattttgagaaaccttacgaatatacagccaacctaccgcaagtctctaccttgaacccggaagaaacgattcccgaaacgatacatgacaagggtaaggacttttttgtggacggcggttattacagaaccctggcctgcaacctgaaatccgtttactggggcatcggcctgggaggattcatcggtacagaatacgtccgccaccccgataaggaatacaacttcatcatcggcccgaaactggaaacggaactggaagtattcatcctgccccgaacggcattgcttgcccgcatacaacaacattggaatcccctatccattgacaagtggaacactgtctggaacgtaggaataaagatactgctctactaaccgacaaatcatatcaccatgcttattatcatattgttagccgatacaaatgtatccggcctgatctccttataccgtgaaataggcgccatgctgataggggtaggctttctatgtgccggactagcggtacttaaaaagctgataagcaaccacgagcgcaccaaagaggccatcatcacctatatcacggcattggtcacttggctcattatctggcaactcttatgaacgtagtggatttgatactggttgccatactcgcctgtgtcacgcttcacttttactttcggaaaaagaagaaagcactttcttccggaaaggagaaagagaagccgataagggaggcggtgcgcaaggaagggcaggagagagcctgtccggtcatctgcgtggtatttcagcctgagctggaagaagaggaattggctgccgagatagccgatatgtacctgcatggaagagcctactactactcaggcaaaccactgccggaacagccgaaagaagagcccatatccatcaagtataaggatgtgcaatgggagagactgaaaacgattcatgtttaattaaaaaataggaacaaaatgaaagcaatcgaaaatgtaagagaaaaagcgaaccaagtcattaaccgctatggaaaggttatcttcacctttctcatattcttcacgctgttgggaacggcacaagtggcggaggcacaaagcggcctgaagattaacagcctatccgaagtgacagacaaagccaaagagggtgcggacaccattctggacgtagccaaatacattttggcggcggtactcggcatcgctctggtctttgtcatctattcgcttgccacgaacaatccccatgccaaggaatacctgctcggctggatcatcgccgtggtagtcatcatggtagccttcctgattatctaaaaacgaagagccatgagaaccatgcgtaaaatcaacaagccgatcaagttcttcggtctgtcatcgggacagttcgccatcttcatgctgctgacggccatcatcatcatcgtgagcatattcaagcagctgcacccgatactcatcatcggaatcatttccgccattctgtttctatccggtctgctgttccaaaccttgaaaaaggaacacaaggccggtaacccggactacctgaccggcctccggatcaagaacgccaccccccggcagataacggacaaacggcagattttcaaattcatcctaaaacagcaaccatgataggaatcatcatactcatatccctgctaatctgtgcgctgtgcctgctgattgctctgctgtatatccggcagacagagatagaggtgaaggacaaatccgtggatctggaaagtgtcttgcctatccagaccatcacggagaacgccgtcatcaacgggaacggtgacatcaccgtcggctaccggctgcttctgcccgaagtgttcaccttgtcggaaagcgaggcgcaatacatccatgagcggttggaggctcttttgaagctgcttccggcaggcacggtcatccatcagcagaatttctactatacggggcgataccatcatgcagaatactcttccaatgccctgatagcggagaacaaccgtcatttcaacggcaaggagatactgaacagttacaccaacctgtatgtgacgttcacgaacggcagccgaaacggtaagatacgcaaaagcgcatcgggcacctcgctgatgcgaaagctgcactacccgttcaagcaaccttataaggaatatcagcaacggctgacagaaatggaagcctttctgatgaactttgagaacggtttgtcgtccatccagcagtttgagatacgcaagatggatgatacggaactgaacaacgccatctacgactacgtcaacctctcttacgagacaccggaaaacgatgccacgcagaagagcgtcaaccctatggctgtcagtgaaagcggaagcatgaaaatagggcagcagcacgtttccatcctttcgctgaccaacgaaggcgagcatcttcaggaactggccgtgccgcacaccggcaagtcgaaggcatacgggggaaacatagagataccggacagcatacggagcaaatgctcgatgctgtaccccgtaggacttggcctgccgttcaaccacatcgtaaacatcgtgatagagataaccgatccagatgccaccgtaacggccatcggtgcggagaaagacgcgctgaactacatcaccaacttctaccctccggcggcagagaagcaacgcgagcaggcagccttctgcgatgagattacccagttcgactaccagaccgcctataccgccttcaatgtcgtgctgaacgatacagaccgcacctcgctcatgcggaaaaccgcactggtacagcaaggcttcagctttatgaaccaaagttcgtgctatgtggagaacgccgagctgtgcaacctgttcttctgcaacatacccggcaatgccagggccaattaccggggcttcgtcaacacgaccaagcaggccatctgctatctgcaaaaagaggggatgtacctttcggacgagaaagggcatatctaccatgaccgtttcggtactcccgccaagataaacctctgggattatccggcgctgaacaacaagaaccgcatcgttatcggcccgtccggttccggtaaatctttctggctgaacaattacatcctgcaaagctatgagctgggccgggatgtgatgatcattgacatcggcggctcttaccgctcgatgatagccttgaaccggggcaaatacttcgactctaccgagcagaagaaatttgcgttcaaccccttcttgtgtgaccgtgacaagaacggcaaatacctgtacatcgacaccacggatgccgagtctgccgatgaccagataaagaccatcgtcgccattatcagctacatttggaaggtacgtgaacccatgctgcctgccgaaaacgccattctcaggaaatccgtcatcggattttacgactatgtgaacaattcttcaataggagagaagcatgagcgtatcttcccgacgctgataacttaccgggcttatctgaaggaagtgttcagcaaacggatgaccgagtttgagaaacagaaattcgagatagaggagctgttgcttttactggaaccctatacggacggagagctgtcattcctgctgaacgctaccgagaacgtggatatcgtgcatgaccggctgatagccttcgatatggaagatgcctctaagaaagagtactttccactcgttgccatcatcaccctgcaaatgatcgtggataaaatcaagaaacgccaggggtttgccaaagagctaatcatcgacgaagcactcgacttcctgcaagacgagaaattcggagacttcatcgcctacctgtaccgaaccttccgtaaaaaggagggaagcatcacgctggccgcacagaacatcctgtttttgaaaaacatgccgtccagtatcaaggactccatcatcatcaactgcgcgaccaagattatcctcgaccattcagaacaccggcagaacctgccggaagtgaaagccgtgctttccatcacggacgaagaggcctatatgatcgagtcgttgcagcgcacggaacgctggagagagtttttcatcaagatgtcgaacgatgccttcatcttccgcaacgaggtgtccgacttcgccgccgtagccttcgattcgcgccaggcgacagtagtacgactgaagcagttgttcaacgaaagcggctcgacctatacggccatcaaccgctatctggaggaaaggaggaaaaagtatggatgacgccacccaagggctgaccgcccttctaggctggtcaaccgacttcaacggcagcgcatacaatcttgccggaagcattgccgccgcacttttgggcgttgcgctcattttcgtggtatgggcactcgccacgaaaaaggaaaatgccaagagctatctgacagcctggctggtatgtgtcatattcaccctattattcatcaccaacaaataaccgtcatgaaaagaatcattctcatactcggacttgccgcctcgatagggctgatgggaaccggcagtgttcatgcccagttcgtcgtgcatgatcccggccacaccctgctgaactcaacggaatggatcgccaatgtcaagaaatgggttacacaaatcaatgaaatgatcgatgcccaggaactgcggctcggcctgcaaaagatcgaccagttgaaggaactcaaatcattgaaagagcttgccgacctgctggacgacgtagcctgcctgagcagcgactacagcttttacctgaacgtaggatcgaattaccactgcctgaaatttctcaactttcagcgtgtgaccgtcaatctgagcctgagtaccgacctgctgttcaaggtggccaccgtgaccagttacttctcgatgaactcggaagggcgcatgtcctttatcgagcaggtgaaggaatcggtggaaaaagccgccgaagagatgcgtgagtttaacgaatccgtgcgttccacggtcatttacaaatccatgaaggggcataaccggaagacctattaccagggacggttggccgctttcacacgacacaccaattaaagcgttatgaatcaagataattttctctggggacttcagatcacggacggtctgacgatggaactcgtttcgcaaatgacagtcatcgccttcggtgttggtgtcatctgctttatctgcaacctagcatacaactatctctatcacggagccagccagctgttaagcccgaatgaggacaaatttcccgacatgatggaaatcgcccgttgcctggtactgttcttctgcctaagcatatacacccccatcgcccaaaccatcgtaggcacgatggaagtaatcaacgaagccacctcgctgacctccgagcgtgcgcaggaatttgcccagttcatggcacaatcagccatcgaacaaggagagatgattgccgaatacgacaaacacagcctccagtcggaggtagcagccggagaagacagcaccggcgccatgcagcacgaactggataaaaagatggaagaggacgaaatgaccggtgtacgctccagcgtggagaagattgtgcagctgctcaaccccgccaacctcgccacccttgtgcttcatggcatttccgccctattggtaggaatcatacaagtagtcatcttgggtatcggcgtggtcattgtcaagctactggtcattctcggcccgtttgtctttgccgtaagcatgttgccggtctttcagaaacagttgagtatctggttcggtacgctctgctccgcctgtatggtattcaccgtcatcaatattctgaaccaaatcatatggcagaccttcaaggccatctatacggaaagtgccgacatggtggacgcagctacgcagcagatacaatatttaggaatggatctcgccctgattggtgcttattgcagctgtttctggctatcctccaaaatcgtaggacacagcgatgccgggaaaatcatttcgaaaaccgtgtcaatcgtcaccacggcggccaccatcgccctgatgggaggcgcagcggcaggcggcaagctgaccaacgtaggcggtgccgcctctatcggggcaagtttcataaacgacaacaataaaaaatagaactatgaatctgatgaaattcaaaggagcagatgatgcggtcaagctgactatccggctttcagccgggtactgcatcattctgactatcgcttttgccagcagtatcatcttccttatcaacaaaatagaaaaagcatacggccaggctctcgtcatcgacaggcagggagaagtctatgaggcaagcagcctgtctgccagcgatatgcggcaatacgaatacatgaaccatgtaaagaccttcgtaacccactggtatgcctttgacgagagcagctacgagaagaacatttcgcttgcgctcaacctcataggcaacaaggggaaggagctgttgaacgagtacaacgatgtgaatatgctgaactcactcatacaaaagaatatccgttacggggtacgcatcaaggatgtagagattaacacacaaacgatacccgtttccggaaagataatcttcacgcagaccgggtaccgggcacggggaagcatctcacgtaatatcgaagcggagttcaccatctatgatatgctgtcccgcagcgaggaaaatgcgcacggagccaagatagaagattggattgtccgctattccgaacccgtggaaagcaacggcaccaacacatcgcaggcagcttctccgggcaagaatgaaaaccagtcagaaacctctaaaccaaccgaccatggaaccgaataaacttatcaaagacaagaacaagctgttgatggccatcccggtaatcctgggcatcctcttcctttatgtattcttcatccgtgaggacgggaacgtgccgtcagggagtgacagacaggccgcctcgcaagcctttttggaaccacagtcggaaatggccgacaaggtgaacgacaagatggaagcctataagcaggacaaactggaagagcaggagaaggcacgcatcctgaaagagtctcaggtcaaaggatctgatttttacttcgagctgcaaaaccagcaggagcggtatgaccgtgccacactggagcgcatccgccgtatgcagaacgatccgtacagcgaagtcatggcagaatacggaggtggccggaacggacgcttctctcatcagctggaaagccaactggacggactggaggacgagcaggcgctcaacgagattatccgggaagccaagaagaactcacgcatccgcaaggaactggaagaatccgacaaataccgcaagcgcatgtatgaacggattgtcaattatgaccaagagggaaaaacggagaaagccgctgccaacccttccggccatccatccgccgacagcctgatgcaaaaaggcccgatctaccatgccgaaaacggcaagcgggtacgccgccaaccgacctccgcaccgggaaacagcaacctcttcagggcttgcatccacggcgaccagaccgtagtcacgggcagtacggtacggatgcggttgcttcaggacgtaaccctatccggcatgaagataccggccaacacgctgttttacggtatcgccactttgggagccaaccgcctcgatgtggtagtcagcaacctgaaggtaggagacaacctcaatcccgtatcggtggttgtcttcgacaatgatgccatggaaggtttgaacctgcccaataacctgaaagccagtgcagccaagcgtatggaacaaggtcttgtacagaacattgacatgccgctctcttccatcggcacgatggccagcgaagtgaccagcgtagtcaacgccaccacccaggtagccaagcaaatcttgaacatgagcctctcacaagtgaaggtacatctcaagtccaactacgaaatgtatatccaagaagagagtcaggaatcgaagttgcgtaggcaagccgtgcaagcggagttacagaagctctatgagcaaatggaacaagagaaaacgaacaagaaaaatcatccccttcaaacattgatagacaaattatgatagacattctcaattacctgcttgcgctgtcagcggtctttttcggctatcggatctacgtatcacgccggaacggacgagcctttaaagaaatccgtccgctgaccgtttctttcggcattaccctgcttcttctatggggcattaccgtattcaccgcctttttttcaagaaccgtttaacatatcgacaacatgaagaaatatatttatctactgttttactgctttgtgtgcagtctgccgctcttcgctcaggaaaacggcactccccggaaacaagccatcagccaaaaagacatctttatctctttcgactgtgtgaaacacctggtatttcctgtgcaagtatctgatatcgccatcggcgaacaggagcttgtcatggccagccgggtagaagaggcgccccatatcgtcaggctctcggcgcaagcggaaggattcaccgaagagaccaacctgaccgtagtctgcatcgacggaagcgtttacacctatcacatccgctaccttcccgaaggcggcacggattcgtacccgaacatttacgaggacaacgggaaatggcagcaccatgactatcaggcagaagtcagcgacctccatctggccgagttcttctttccggaggacatcgcttacggaacgcccggcaacgaggtgtccttcactctggccgcctacaacaaccagttgaaagtatcaaccgccaaagatgccgtggcatattccaacctgtttgtggtggataaggccatgaacacttaccacatcaccatcaaacggggcaatacctccgtattcacctacaattttgatgaccagcgcaaatataccgcccatgtggatgtgaacagcgaggaaatggaaagatgcatccaagagctgcgcaccaagaagcgcaacatctacagcctgggggtcatcgagaacaagtttgagttgtcaatggccaatctgtatgtgcatgaggacttcatgtttttcatctttgacctgaaaaacaaatcatacatcgactacgacatcgagtttgtcaaatgtttccagcgtgaccaaaagaagagcaagaacgccatccagcaagaaacgaccatcgaacctatctatcagaaagattttgatacgaaaatcaagggcaagagccggaaccggctgatacttggtttcgacaaattcacgatacccgatgataaggtattcgagatcgagatttacgagcgaaacggcgggcggcacatcaagctggccgtgttgaacgaatacatcctttccgcagaacccttatacaagccacagccatgaaactgagagaagcattagacacctatatgttcgacaacgtgggacagttcggcggcatcgccgaatcactgggctatcagaccgaataccgggacggatatttccggttccgcaaagacggggaagagctgagcatgagcgtaagcgaaatcagggaaaaagccggagcaaagtacgatgaaagccttcgtgaccaatcaaaagaacgtgtatccgccctttttgacaaggaacgtgccaatgatcctaaatatgtcgccgagctggagaaggatggcatcagcatcaagcggtgggagaacctaaagggacatgacaaggacggctttaccgtcatcgaccatcgcctgaaggtatgctacaccggacagtcgctctatgaatacgcctacaagcaagggaacatcctcgacgggaaaggcaccaagctggaaaagggtgtcatgtctgatttgatggagatacacggcaaaccggggaagctccgtttcaacgatgacggaatctccgtattctaccgcaaagaggcgttggttatcccggacaaggtgctgggaaagaagttgggcaagaaagagaaagaacagctgcttgccggtgacatcgtacccatcaccgtaaataagaaggacatcctgctgcaagttgaccgggatctgaactccgtcatcctgcgcaccaaccaggaaatcaagattcccgacatcatcgggcagaccagcgaatatggcggctacaagttaaccaaagccgacaaatacctgctcgccaacggccatgcactggagaacaagctgctgcacagtccggaaggctacttcattgccgacatccaactgacggatgacaggaaaggagtcatgatacagaacatacagagtatcactcccggcaaggcacaagagctgatcaaggccatgacccccaaactggaagcccatgcggccaacatagaagctgcaaaagagcaaaaacacgaagaggggcgcaatatggaagccgagtttaaggaagcggtgggcaaacatgactttgaaaaaatcgggaagctcaaagaggaaggatataaacccagtgaagagtttatcaaaggaatcggtaaggaacacggtctggatgaaaggcaaacccatgaagtcatccagctgttcggcaccaagccggaagaacagggcgaacatgaaaggcaggccgcacgtctgttggatgccgcacagaccgacaactttcatgtcatccaagagatacagaaagaagggtaccggctcactcaagaagaccttacccggatgcgtgaaacgggtgtgcaagccaacacactgatagccgtacaaaagattttcgggatggaaggcagcacaaagacactgggagatgtcaaactggccagcacacccaaacccgacaacagcaaggaaatggcccgtccgatagccagcaccatcaaccgggctttcaatgacttataacctaaaaaatcaggaattatggattacgatgaattagtacagaaaaacattgcaggagaaatcagtgacttagagtttctacttgcacaggaagagcttgcacaagcctatcaagaagagatggctgccaagcagcaagagacaaacaaccaaacggccagagaatggctgcttgattacgagaacagaaatctataccaataaatcatggatacagcaagtgataaagcattacagcgtttcgccgaactgatgatcgaaaagataaagcaggtggaagacaactggcaaaagccttggttcgggataaagggtgggggacttccgcaaaatatcgagggaagaacctacaacggagtaaattccttcatgttgtttctactttcggaaaaagagcagtacagcctgccggtctatatgaccttcatgcaagccaaagacaacggccttaacatactgaaaggagaaaagtcattcccagtcatttactggaatttctcagtaagagacaagaacggaaagaaaatacctttcgacgtatataagaacctggataaaaacgagcagcaggaatataaggtcacgccgtttctgaagacatacaatgtgttcaacgtacagcagaccaatcttcaggaaacgaaaccggagaaatgggaagcattgaaggagcaattcaagataccggccatcaaggacgagcaagggatgctcaccgtgcctctgattgatgcgatggtacgggaacagcaatggatctgccccatttattccaaggaaggaaatagtgcttaccatgcaaggggagaagataaccatatcgtcgtacccctgaaggggcagtttaaggacggagagaatttctactccacactactgcatgagatggcgcactcgactggagaacctgagcatctgaaccgggaaaaaggcgtgattttcggagacaagcaatatgccaaagaggaactggttgccgaactcacctccgctaccgtcgggcaaagcctgggaatatccacccatatccgggaagaaaatgccatgtatctaaaaaactggctgggagccttgaaagaagatcccaaattcatctacaacatccttgccgatgtaggaaaagccagcaatatgattcaggaacataccgcacggatggaacagtacctcacaccggaggaacggttcacgcaggccgtcctgcaagacaaccgtccggtattggagcagatgaaaaacgaaggttttaccccttcatcacggttattggaaagtgttgcggcaaaccatcctacagccgacaaccttgaaacgctacacagcactttcggcatttcgctgccttccatggaagcggagccagccatgaaaaatatgaatgagccacagctcggattataaacttttaaaaaccatcattatgtttacaggacaaattatcggttatgtcggtgcggatgcccggcagaacaagaacggaaaaggattcaacttccatgtatccaccaagtacaagaacgtgaacaacgaggaacagaccctatgggtatgctgtttcgtgaattacgagagtaaagtctttgagtatctgaaaaaagggacacaggtatatgtctgcggcgatgtgtatgccgatgtattccagaaggatgacggtagccacatcccatccgtcagcctgaccgtctcacgcattgagttactgggaaaggcagagaaaaaagagagcggtgacggaacggcatccggacaaccccaataacagcaacggccatggaaagagagaagaaagacctgtcattcatcctgatcctgctatccacgctcatcgggacagccgtactgtttcagtgggctatcgttacgggattatacgctccactacgtaatccggccatgtgggaaaggctgatggagaaggatatcctattccggtttctctacgttatcctgatcggaggcctcgcttttctctttccggttggcaaagtgaaagacgaaaacaagaaatgggtttacaccagtatgacactggttacggcatccatgctggttgtcggattcagccggttatcagcgtggtataacctatttgtatttcccattctattcgtagcgtacacgctgcttgtcatcaagactctgccttatttcatccggcgtcatgcccaatccgatgatagcattttcgggttaagccgggaagaatcggctttctacttccgctttgaaaccgcctccgggccgctggtcatccataagccgcagcagaatgtctatatcgacggcggtccgggaagcggtaaatcagagagctggatcaagggaatcatctaccagtgcgccgagcgcaactatgccggattcgtgtacgattgggagggtgatcccaccaaggacaagtcacccatcctctcacgtatcgcatacggaagcatcgaacatttccggaacaaggggatggaaacaccccgtttcgcctatatcaactttgtggatatgtcacgcacggtcagggtgaacgtactttctccgcaatacatgtcaaagggaaacgaatcgctattcatccgcaatatcatcatgacactgatgaagaatctggaagcaagctggaaggaaaagaccgacttttgggccaacaatgccatcaactacgtctattcaatcgcctataaatgtttcaaggaaaggaagcttggtatctgtacgctgccccatgtgatagcccttgccctttctgacagcaacctagtattccactggctgtcggaagatcctgaaatcgcattgaacatgtcctccatgctgaccgcctggaaactgggtgcacaacagcagacagccggagccgtatcatccgcacagactccgttggtactcctgaacaacaaatacatcttctgggtgttgtcgccacttcccgaagaagagttctctttggatataaccaacaaggaacacccaacgctgttatgcgtaggcaatgcgcccaccatcaaggaagccgtttcccctgctatttcctgcatcggcagcgtcttgatgtcacagatgaacaatcccggcaaagcgaccagcatattcatggtagatgaatttccgaccatcctgttgcaaggcattgacactttcatcggaaccgcccggaagcacaatgtcgctaccattctcgccgttcaggacttcaaccaagcggtcagggactatggagagaaaagtgccaacatcctgaaagcctcctgcggaacgcaggcttacggtatgaccggaaatgagaagaccgccaaagacatcgagaacttgcttggggagaagaaagaagcgcaagaatcttattcacaccaagccggtggcaataacagtgtcacggagagcctgcaaaaagaaaaagtcttaaaggcaagggacattgccggacaagcagccggacacttcattggcaagattgccggaggcaagccgccattcttcagcgtgcagatggatatgtgccgttttgaagagaaggagataccccgtttctccttaccggtcaaactgggcaacggcaaagaagagatggaactggaaatcctggaagagattatccagcagaactacatcaaaatcattgaagatgtcaacgccatcctcaaaaagatagaggacaaattaaaagaaaagtcagcagttccgccaaccgggacacacaagacagaacaaaaaatcatccgataacattcaacaaaagaatcctaccatgagaaaaattcattcattattagcggcagcctgcttattggccgcttcatgcaacaaagaggaaatccaatcggaaacagacaaagccggcatgtatcacatcaccgtagccgtaaccggttcctcacccaaaggcagtgtgcatatatataatcttgacggcgtgagattcaggaacgaacgcaccggtacctccgcagcttccgtagatgagagtttcaccgataaagcggaatacagcacggaaaagcctgtcagccaaattaccgtgcaaggcattctctattcaaaagagagtgctatcatcaccatgcagataaaaaaagacggggaaagcgtattcaaccagagcaaacagttggaggccgttcccggtatagacactactgttgatttggtttacagtaccttgaaataaaaatgcagacgaatcaaaaaacatatactttctcttccatatttagatgatatttcttatctttatgaaagataatctttctcatttataatctaagctcagataaaatgagattcaactaatccagtcaacgttatgaaagtcgatttcaatcagataaaaacaaccatttctctgcccgatttcctgctggaactaggatggaaaatcgtggaaggctcttccaactcctgtcccaaaatgagcaacggaacgcataccatcgtcatcaagcggaactcgcagaaccaatacacctattgggacgtgcatagtgacagcgtgcgtggccgcagtatcatggatctgatgcaggaacatctatttgaaacaaccggaaaaatgccgtccttgcgcgaggtgggggagatccttcagaactacatcaacaccaaccgcatcacgacacccgaaaaaagccggtatgaagtaggtaacacaagcatgagagcggacgaacttcaattctacttgagccagctacaaccctacaagggcaattatctccagaaaagaggtatcctgaaagaaagcattgaaagccggttcttcaaagacactttctttatccgtgaggtaaagaacaaagggagtgtttaccgcaacgtgtgcatcaagatgtacaatgaaaacggtgtgcaagccatttctcaacgaaatgaaacattcaaagggattatcggtggcaagttcgactgtctggcgaccagcaaccatgacaaaagccgcccgatagacattctctacattggggagtcatttatagactgtatctcccactatcaattacgccattccggaaacgacctcaatcttgtatatgtatctacggaagggacattcacggaaggacaaatgaggctattacgcctgattcttgacaagaaccaggtaaaggagctccggagcatctttgacaacgacaaacaagggcacaagtacactctatggctgcatcgttactttcatggcgatacgactgatgtcgagagcctgagtaacgatgaactccgcaacaaggtacggaaactgaagaacgtcgaactttcggaaaacaaggattggaacgatgatctgaaaatctcgtgtggcatctgttcctccacggaggacggccagtaacctcatagatttgctccatcacataatacgacaacctataaaatcagatcaatatgaatatcaagcatttatttttttgtatgctgctcattgccttttcctcatgcagcaaacccggctatgagaaggccattgcggaatgggttcagacagattctcacggcacctggacggatttaaagttcgaactactggaagtgttggaaacagaagacgtcaccgtatcggacagcctgtgctacctgaacaacaaaagcgcacaattatccgctgtcatacagaaagcggaaagtccccgtgccttattcaaaccgtccttttccgcctatatggaagccgaaaaaagcctgaaagcaacggatgccatgaaagccatgtacctgcaccgtgacagtacggaagttatcggcaagatattaaaatgcaggtatgccatcgtccagccacactcaggggtgcagcagaaaaagacggcttctttcctattgtcccccgacatggaaaaatgtatcggcaaactaaagccgacaagcaaataatccgagcgtaacgatgtgtagcgacaacgttttttggggttcttttttgggcgtcttccaaaaaagaactcccacacatttagatgtgtgggctattcattacactaccatcctttcccttatcaacggtatattatcccgtaccaaattcagaatccggtcatgataggctgataattggttagactttccacgacactggcacacctccatcctgctaagtgaaaactccaccgtttccatgcgccttccatccaccgttgccgacattatcaacgaatcttctctcttataataggcgttgctgaatacacaatgatgcagcaactttccctctttgtaaaagtccgaaaggctttccaatacccgaaccataatatttccatccgcaaacgaaagattaaagaaacgtgatttggcagcaatatagtctttttcatccttttcagaatattttttcttacatttccccatcacccaatcatgcgcttcttctacattcaacggacacaaataatgaggatttctcgcatccaatttattttctatcagcatatccacatagtccagccacaagtccgcatcatgtatcacatagtcatgtcttaaacagatttttacatacgtccaatacttatctataccgtattttctctctaaaaatctcaagaacaaattcatttgccctgccttatataatatctccatccgattatcagttaataatgtcataaagaaggaactcggacaaatatcataaaaggcacccttaaatccattcctcgtaagttcgggtatcactttcattctcggatagataactgccgggcaaatatcataaatacggtcatgatgcacattccgcttacgcaattccaaagaacttccatatatccatgcatcgtaataaaatatagacatgccccgcagcaaagacagcgtttctgtcttgccctctttattcatccaacactgtaccgcctcaattataaagtaattagccggagacccttttttcagccggcagtccaccataaaaaaacggataacttgatattgcttgtatgtagtaatcacacaaaaatattctttatatacagccgtccttttcctgctattctccaatttcaggttcataccgcaatgaggacatttacagtttttcttatcttccttatcccgccatgtatgcccacaatccaaacaaaagcaattcccctttgcatcacgcttgaaataatgcacaaagcaatgtttataggcataacgcttttgagcctctgaaacgggagctaacttcctgctcccattcacgatttccatttgtaattttgtcttgggtttcatatcaaaaaagagttaactgggtttgtacttcggtgttgttctcacgtttagcttgttgacgcttcttcaactttgccaattcttcctcctgcaattttttgatagcagcctcacgagccgctttcttttcttcctctgacaattcaacatgatgatttacgactacattacatttcaatgggctacccacctcaatattatcttcctgataatagtgcaacgccataccaaaaatttcatcatcactaaaaccacagcaaccgcttttcttcacttggtttaaaatataggtaatgcaattatctatattctttgtaggtttttgatagactggagcaaacagactatccaccgctgccatattatcaaggtatgccttgatggtacttttaaattgttctgacactttcatagtatatcatttttagatttcatttcacaataagccaatttcacgagaaacaaggagaataggcaaataagagccaacaacgtaaccgacacaacctttatcggacttggcgttattaccgctccgacaaacatagccactgcacaaagagcgatgatgaccgaaaaaacaaattgaatgatttgcatatacttctgctacttagtttgttaaacttctaattttatgcttcagctagatttaaagacctttttttaaaacccctttccgggatggccttttctttctgccgactttttttttgagctttcatgccccatctgagtttatgagccttttttttacggcacacaacaataaggaaggagggattaagaaaagttttggacgacaaaaaatgttggggacagcgaagccgtccggcgttatttttttcgggacaaagggcgaagaccggaactctttcgtatccatccaccgaaataaatttgccgttcaaaaacaaaggatctcagatggagctatgaaaaaagcacattaggggaggcagaaaacaaggaaaagggcagtacggaaagtaaaacaaaccatacggttttgcttgcaaaaccgtattcctatctccctgccacaagtgacagggggggaacgggttagcaacggactgccgggacaaacggtaaaaggaaggaactgcaatacggaagaaggaggttgtttcggcaatgccgaagctccggatgatgaccattgcaatcccgcccacgtttggaacttctcttttctggtttgcccataatcagccgcatagcggatgactacgggcaaaccgggaatgagaacagtcattccgatgaaggggagggtggggaagaatactgcgtgaacgcaaaaacactctcggatatgtagcaaaaaaaagcggcactaggccgcttcaatcatttgcttgcttttttctttttagagacagccttctgtttaggctgatccggtttttcttcttctttttccggagccggataaaacttggtggctaccatcacaatgcggttacgcttctccccacttttagaatccgtccattcttccggcttaaagtagccttcaacggttatcagctcaccttttttcaatacatcgaaggaatccagtgcttcattctttctccaggcttcaatccccatgaaagcggaaacataagaggtttcttcacctgtcttgtctgcacggctgaccgcgatagaaaagcgtgctacgcttgctgtttcaaaactacggatttctgcatccttaccgataaaacctgttactgcgaatgaattttcaatctttttcatatctctgattttttagaagttaattaatcaattttacagtgcaataactgattgttggctttgggggacaccatgaaaaaagatataaatactctttttatgctggccggaaaaaggaagatttgtaacttttttattggtgaagatggcagcaaataattcgggttaaatacgctttttatgcaaggcaaaaaaaggaagatttcagacgaataacaacgtggtgtttgtgaatcgtccccttatccccgtaaaaggggttagcaacaatctatatttgcaacggaaaatgatttgacttccctaaaaaatgatatgaaaaagacaaaacttgaaaatcagcaacaggtttggaaaggatgcaaaaaacaaccggtcagacagcaagcatggcacattccgaaaatatggtcagccgcctatcgacacaccggaagaaacctctgcaattccttttaaaaaaatgaagccgaagaatgaagcatacaatattccacgtatcgaaaaaagtgactgcacgataaaatgaaaggctgcaacggaagaacagacttgcggattctgcggggagaacataaccatacaggcatacagccactacaactgtttccggaaaaagaagattatacaaccggaaaaacagaaaggcatccactcggagaaaagcaagcaaacgattgaagcggactgccgatttagcggcgaaatatccgactacctatatacagccctaaaaggctggggcatatgggtaagcaacagactgccgggcaaataaaaggagagtggcatagccgccggaaagaggttgtctcgatgtggccgaagctccgaaagcagaccggatatgcctctctcctttgccttccccattcctggatttcacacaatcacggagcctgcgagtgactatgagaaatcctgaaacggggacagtcactccgctgaaagggtgggtgggaaacatgtgactttctccaaaataacaaataggggtataaagatctcaaaagaaaagaaagccgttccagaaaagactggagcaactatcaccatctactgttctttaagttaattgcagcaaatccaaatcatcagtgaccaatccatccaatacatgttggattttatcaaatatagccttatctatgccatacgtggcgcataacgattgaaatttgcttacagcatcgaacacctgtaatatcttcttttcgggctcctctacaaaatcctcggcaaagttgacgaaatcacttgtagtcaaggcagaccttttgcccatcacgcccatcgaatgaatgtgtgctgaagaattttcccatgtatttgccgtgaacattacatcatatgcaggtgataaacgccatacccctgccttatccatgataaacgatatgttcttattatgatcatcggatatacctgcgacataattaaataccattctgataaatatctgatctttgtcttcctggggaagtttcagagtctctgctatccaacacagcttcatataatcatctgcacccggcataatggccgcaagggtctgactaaagagcttttctccattcttacgatcaaatctttccgttacgaaatgatttcttccatcaatttctttcaggaagcatggcatcatgttgattcccgccgcctttgccatttcgctatataccatttctatctctgtggtaggagagtcatctgcttctttaaatttgatgatatactgcttaaaattttcaggcaaatccacctggccggaacgaaactcttccgtttcgagattataggcaatcactgccttcgggcgcatgccaccggcagaagttccaagatatatcaactttttcatcgtgaggctatcctccggtgatatgacagcagcatctcgatcattatatattttagaagccaaagttgccaatgatgacatatttactgactcatggatggcatcatcattaaattccggttcaaattccaatgctcccatagccctcttgccaatataagagagcttcaatagaggcaatgattccgtaacctttatattattatccgtgagccattggtcaaatagggaagccccccatttgtcaggaagcgcatctgcaagaaattccggaagcccttgatataatttatctttattcccatagaaagacgcaaacaaaggggttctcttagggtgtgtggaagggcatatatcataatcttgtttcctatattcatccgtaaattggaatacagaacaatgcttttcaaagtcccaattcaatttgccaatgcaagtcccccacagatatacattcactataatcggctctttcttcataccatcttacgtttaccgttaattctttgtattcttttacctgttttttcattgattaggaaaggggagtctggaagttccggaaccaaaccgacaacgccttcaagagttccacttatacgcaaaatcttaagcaatgtacttagggcaatatcacttactttacaagattctattctcttaatagtaacgatagatactcctgccttatccgcaaattcttgctgggaaaaacagcagctaagtcttatagacttaactctcttgcagatttcctttacaatacattcatctgaaaattcgtatattgtatatgtatcatataatcttttcatagaaaaacatatttaggtatcatttttgatacaaaaataccgataaatctgaaaatcaccaaattaagaaacactttttttataatcttctgccgcattagcaaacgattgaagcgaccttgtgccgcttcaatcgtttgattgctttttctttttagtccgggggttcttatttttccggagtcgggtagaacttagtagctaccatcacaatgcggttacgtttctccccacttttagaatccgtccattcttccggcttaaagtagccttcaacggtaatcagtacatctttttgcagtatccaaaaagcatagcggtcttccatcttactctaggcttcaactttcataacagaggaaacaaatgttttttcttcatttatcttgcctatgcgactgaccacaatagagaagtgtgcaacctttactatttcgaataaatggatttctgcatccctacaaatcctgcctgttactgcgaatgaattttcaatctttttcatatctctgattttttagaagttaattaatcaattttacagtgcaataactgattgttggctttgggggacaccatgaaaaaagatataaatactctttttatgctggccggaaaaaggaagatttgtaacttttttattggtgaagatggcaacgaataattcgggttaaatacgctttttgtgcaaggcaaaaaaaggaagatttcagacgaataacaacgtggtgtttgtgaatcgtccccttatccccgtaaaaggggttagcaacaatctatatttgcaacggaaaatgatttgacttccctaaaaaatgatatgaaaaagacaaaacttgaaaatcagtaacaggtttggaaaggatgcaaaaaacaaccggttagacagcaagcatggcacatcccgaaaagatggtcagccgcctatcgacacaccggaagaaacatctgcaattccttttaaaaaaatgaagccgaagaatgaagcatatcatattccacgtatcgaaaaaagtgactgcacgataaaatgaaaagctgcaacggaagaactgacttgcggattctgcgggagaacataaccacacaggcatacagccactacacctgtttccaataaaagaagattacaccaccggaaaagcagaaaggctccactcggagaaaagcaagcaaacgattgaagcggactgccgatttggcagcgaaatatccaactacctatctacagccctaaaaggctaggacatatgggtaagcaacagactgccgggcagtcactccgctgaaagggtgggtgggaaaaaactaagtggacgcaaaaaacaaccttaccattgggggataaacttccccctattttcacttcacatattctttaccccacttcaattgattcaacaaacttcaacaacaaagcgactgttaccgtatgaaatgaaagctgattgaacaacttatgcgctttcagcatctcaatagcggcttcagccgtaacaactctctgttcataaagccgaattgtcgcatataactggtcatttgcgacaggccccattattaggtcatagtcaccgttttctcttcctctgcggttgttgacaacaaactccagccattcttttgttgcacccataaaccgaagaaccggatattccctatcaagaatatcatcgggaacttcataaacagagacgattgctttttcgctctgttccctgttcttcttcaacaaagcccatttttttgcttgttcaaagttggttgtcgtataaaatcccttcccaaagtccgtagccttccgtcctttctgtatattagggcgtttcacggtaactgtagatccatgaaatagtctcattttcttttattgatataagtcgttatagtatctaatatatattcggggtcttgggtatgaagcatttcaaaagtctcatccaaaaaatcaaaaaccccatagtccgaaaacaacaacaaggtttcttccgcactttgtttcttttcctccctataattctcaatgcagaacatcttgaaaagcaggatcttcgtgtcaccgttataccgtcgtttttcttctgttttttccttctccaatgtttcataaagcgacaatgtacttgaataccataacttggtactcttatccagcaaagatttatacaacttggaagaatatatataatacagtgcatcgcctaaaggcaatgcctttttcttcatgaccagttctaccagctctctcatcacgaatgggagcatggttgagtcaagttctccttgatttttatgagtaatttccatattcttgttgttattactttagcatattttcgaaaacaccttcttcacagttctttatacacacctgacactcggccaccacttctcttaatattcgggcacattcttcattcgaatgcccttgcagtaattcataggcatatcgcatcagttcattagcttccattgtttccatccttatcaataatattcaagttcatcattattttctgcaacgactccatatttggagttcctaaccaacacacacctatgcaaaaggtcatattgttctctgtatctgaaaaacgcatattgttttaccttttacaaacattgttgtcccattaaaatctaaaagagttctttgaaatatttgaaatttagttagttacagcgattttccgagcgaacggacttgaatttgtagctttgcatcagattaatccgatggcatatgttccaagacaaatacgttttcgctcaattggcttcatttctgaatcgaagtaagtttaaccgcatagtcaccaagtatgatggtgataaatatgtgaagcacttcacctgctggaatcaactacttgctttgatgtttggtcaactttctaatcgtgaaagtctgcgagatttgatagttgctcttgaagctcatcattccaaatgttatcatttaggaatgggtaaaaatgtatcaaagtcatcgctggcaagagcaaatcaagatagagactatcacatctttgaagaatatgcttactacctggttagcgaagcacgacaaaagtgtgctaatcatattttcaaacttggcggtaacgtttatgctttcgattcgactactattgacctgtgcctttcagtcttttggtgggcaaaattccgcaaaaagaaaggtggtatcaaagtgcatacattatatgatgtggaaacacagattcctgcattctttcatatcacggaagcatccgtacacgattctaaagttatgattgaaattccttatgaaccaagctcttattacatctttgaccgcggttataacaacttcaaaatactgtataaaattcatcaaattgaagcctactttgttgtcagagcaaaaaagaatctcgggtacaaatccatccaatggaaacgtaggctgcctaagaatgtgctttcagacgcaagtgtatttctgacaggattctatcctaaacaatattatccagagccacttagattggttaaatattgggatgaagaacaagaacgagaatttacattcataaccaatgcgatgcatatatctgcgcttcaagttgctgaactttataaaaatcgctggcaggtagagctgtttttcaaatggctcaagcagcaccttaaaatcaaaagattttggggaactacagagaatgctgttcgaatacagatatatgctgctatatgcgcttactgtttggtggcaatcattcaacacgatatgcaactgaacagaagtacatatgaagtgttacaaatactgagcatctcattgactgataagactcatctgagagacctctttgataaaactaaatttcaaaatgacaaagaacgattcggaccaaatgggccaagtttatttaatttttaattcgtcccaattttaatgggacactaatgttttacaaaggtaaaacaattaagtaaaattcatctatcattgcttttcatatttattgtgtctttctcttttgcatcggaagtattagcacttacagcaaccagacagtatgacatcgccacgtttgatcataccgctggaaaacaacgatatacaatctgaatcaaaacagattgtatatcaccaatttctttttttgtgccttgttaaacgtataagaagttcctccggcagattttccatcccaataggcaatcagcctacaggcgtgtgaaatcatgtaatcattacggtgggcatagcattgggcataataatattcggatagaactaccaccttgtcggcttggcgcaaaatatcagcatacctctgtttgtcctctttgttgaaatacacatcttgcccgacataaggaacaaccgccaccaaaaccatatcgggatattgtttcctttgttcaagtacggtatgagcagccatcatgtcaaatccaaccgcacaaccaatatagaaaaaacggattccattctcatagcagaaacgtacctcttcattcaacgatacggacaaagcatatttatttgttcgtatcgttctatgaccggtaaaagcaacggacatcattttcatccatttatcacgtgcctttctacatatatccaacgaacctgccgaagtttcatacaccattccattcacctcataacgataagtgaaccaagtagtatctccaaagatatccttctgcttctctatataactctctttttctttcatcttataacatacggacaactgttttacctaaaaagaaacctcccaaaacctcacctcctattttttccaactgacatgcgaaacgagcatacgaaaacccttttgttaaaatatcgtcaaataccaagattttcttaccccgaaaaaagtccttgtcaaattctatcacttgtactttttgaagcgacttgctgtcaaatttctcgtgaatagccaaacgatctccactgacacgtatatgttcatacgcattgatagcacctgaaaacttacacacagccgaagcaaaccccttataacgaagttcattcttatcagcggaagaagccggaacacaagcaaaaacaatattcttaacatcatcaccaaaaacttgatgtaacttattcgctatcatccaagctatattcaaataagcttttccatccttaaaactccatatcatcttacgaatttgccattctctttccgttgcctgccgatattgcataggaagatactcaaagaaagaaaacatcatcttatgccattgtctgtctaaactaggatatttactctgatgtgccatagtcttttatctattaaaattaaacttatgcttcagctagatttaaagacctttttttaaacccctttccgggatggccttttctttctgccgactttttttttgagctttcatgccccatctgagtttatgagccttttttttacggcacacaacaataaggaaggagggattaagaaaagttttggacgacaaaaaatgttggggacagcgaagccgtccggcgttatttttttcgggacaaagggcgaagaccggaactctttcgtatccatccaccgaaataaatttgccgttcaaaaacaaaggatctcagatggagctatgaaaaaagcacattaggggaggcagaaaacaaggaaaagggcagtacggaaagtaaaacaagccatacggttttgcaagcaaaaccatactcctatctccctgccacaagtgacaggggggaacgggttagcaacggactgccgggacaaacggtaaaaggaagggactgcaatacggaagaaggaggttgtttcggcaatgccgaagctccggatgatgaccattgcaatcccgcccacgtttggaacttctcttttccggtttacccataatcagccgcatagcggatgattacgggtaaaccgggaatgagaacagtcattccgatgaaggggagggtgggaaagaatactgcgtgaacgcaaattaatgggattaccagtaactccaagcgttttttgctacttttttggggtgcttgccaaaaagtagcggacagcaaaataccctcccttccctaatccaaaagaagggagaatgtgcttcattgaaggtatataggttccgttccctgattataacaatacatagtgttatttctgaaaccatcaaagcatatatgaaaatcatcgaaatcctgttccgtggccaaacgaaccttatcactcaacaaaaccatgcattgtttattgacagatgtagccaaagaggtagtacgtcccggctttatctccaatgccaccacataagaagtccttcgtggatagatatacccaataatttcctcattgagtacaaccaaacgaataacatcttcattcaaaacgggaatattattaattttgcccatcattgttataatataaatcagtttataatcattaaaatacaatatcattacaaatgatacctataatttttataggtaaacttttccaccgagaccacctcataaagatagtcttcatggcaagaagccattatacagttctcacattcaagaataggatttataactacacggaatttaatagtgccgtccaccagaacaaactccacccgattaaagaacccttgtagagaatgcccttccttatccatcagacgcactacttcacctgtaaaaacagccaattccttagcctgccatttcgctttacgcaaacaactgttcgccgctttgacgttctcattcacctcttttgttcttattgctttcataccaaaatcctttttacatatttatcttgtcaaaaatcaaaagtcagctgcgtagcccttgcgttgctctgaatcgacctcttcaattcagaattatcctccattgcattttcaagtttcctaataaaagaagtgtcacctgcttccgttatctttaaaataggcaaccatactccggctatcagctgtaaatctatatgataacttctccaatgctgcattgtcaatgtattcatccatgcgacttcaccgggtacgctattcatcatcagattgacaacggtcatctttacacaaatcaaatctatatccgagccataacaaaaaagccttcctccatcattctcttccgcacatttttttacagcggaaagtagcatcctgccggaaccacagcacgaatcacagaccgactgtttaggtttcagcctatttccccccatacatgccatcaaatcagcaacgtgtatcggggtaaagaactgtccgttattcccatgactgacacactccatgaacatatctcccaagacatcgcaaaatccttccgaatattcagacaccctataaaacatttgaacaaaaagttccatttcatatggcttatatcttttttccactctacgataatcctccgccaacatcccgacagacaaatagtaaagacaaacatccaaaaaatcccgaaaggcttcttcatatccccgactgaaagcaagcttttcataaagtttcattatctcctttggtatcatacttttctgacttcattattcacaacattctatattccttgtgccatagattttatcaaaagccgcttttatctccgagcgatatttacagtccttctcaaaacaaagttgttttgtccaaaaatcgaaatcaaaaccatcggtattatcaatcgttacagaaacataatcagtcataccactctgacatacaaccgtatgccgatttacacaaaagtggtcatttaaagcagtttcttttcgggtaatgcgttctaccatcttatctatccacttcatacttataatattttatgtaattgccccattccaagaggcagttacggttatactcattaaaaatcgttctcgttcaaaaacagcacatcgcctttcatcaccatccaattaatctcactcagatgatagccacaatgcccactcaaaaaaatctcaatctcttcagtggtctgcaatctcctgtctgggcttatcaccgcaacattaccggaattacaatccaatacagccagtttctcataagcccactcaccaaactggcagaactcgataaaattggtataggttatccgtatgctattgtttgcatcaaattcaaggggtgactttgtaatgaatgaacctgcatgattcaccaccacagaggggctaatctctgccaatgaagataagctgtcatcccatctaatctcataaaggaaaaatccttttggcaatgaattgcggtctatacgataactggaaaaaagaccgtctatcgtttcattaataactaactgttcataatctccttctaaatagtgtactcgtgacataactcgttgttttttgggattgttaaacttctaattttatgcttcagctagatttaaagacctttttttaaaacccctttccgggatggccttttctttctgccgactttttttttgagctttcatgccccatctgagtttatgagccttttttttacggcacacaacaataaggaaggagggattaagaaaagttttggacgacaaaaaatgttggggacagcgaagccgtccggcgttatttttttcgggacaaagggcgaagaccggaactctttcgtatccatccaccgaaataaatttgccgttcaaaaacaaagggtctcagatggggctatgaaaaacgcacattaagggaggcagaaaactaggaaaagggcagtacggaaagtaaaacaagccatacggttttgcctgcaaaaccgtattcctatctccctgccacaagtggcaggggggaacgggttagcaacggactgccgggacaaacggtaaaaggacggggctgcaatacggaagaaggaggttgtttcggcaatgccgaagctccggatgatgaccattgcaatcccgcccacgtttggaacttctcttttctggtttgcccataatcagccgcatagcggatgactacgggtaaaccggaaatgagaacagtcattccgatgaaggggagggtgggaaagaatactgcgtgaacgcaaaaacacagtatgtcatcttaaaacaatatctttaaaaagtttttcagaagaaatgcttaccaatatcctaataattattacttttgataacataatacaacgatatggaaaagaaaaagattacaatagaggtagaaccagctacagccgtagctaccgtcggtttattgcgtgggatatttcccagtatcatcgaacaactggaaaggcaagccgcaacaaacggcagccccttaaaattcaataaagtagaaaatatgcaagaagtattggatgagatttatgaaaagtgcattgccgaaacgaacctccgggagtttgcccaggcgcacttaaatagtgacggattacctaactgatacagaaatacggaatctgccagccatccttattccaaataacaaatggtacagaattacacacctgtcatgtgggatgacaaagcatttgcctttgtcccctacgaagcattcagtgatttgccacattatcccaaagaaaaatgtgagcaaatttgcaaagagctgaacagccttataagactatgtacttataggccgaaaaaggaagatatttattttcatccggtaagttatgtacgtcgttccggaggtttcatagttacggataatcaggcatcctttgagaaatgcccctatcctgcttgcgcagaccgtcatagctgccaaaaaatatgtgatttgatgaaccgtatcattgaagagtcttaattatataaaataccatggaacatccaaactccaaatgcagaatagcacaagctgaatatttaagtcggctacctgaagaagaacgggaaaataaggccagagatattagaatcggaaacgccagctatatttaccaccaacaagcggttccaatccaagaaaacagattgataatgtattataaagagtggttggaaggtcttcctcccaacatttcacgccatatgagaatgcttggatttgaagcatgtaagacaatgattccgtttacgagatatgtgaacgaaagaaacgatattggtatgcgtgactggatgcaagagcatctttcaccgagtgacttcaactattggcaggaactttcgaaaaaagcaggttcgccaacattttaatcccatcccgttcaatacgctgcctgaagaataaaaggtgcgtattaaacgagaatattttttagcgtttagtcatctcttcccgcaccagttccgtttctgtcggggagagtttcggcaatttgacagttgccggactttctaactggtaagccttcacctcattgataagcagctgccagtcaaaaagaaattcttcggaacaaccatgtttacgataaatttcttttgctgcttccaaaatctcaggagcgcaaaaatcgtctccctgaaagacaactgccggacgatcattattgatacagtctctcaataatcgtaactgatctttcattgtgtttacctattatgcgttctgttgttttaccattttcaaaaattcgtcagacggtttaaatgccggtatgttatgagccggaataatcatagtagtattcttagagatattccgagctgtcttttgcgctctcttcttcactatgaaactaccgaatccacgaagatagacattttcctccttacccaacgaagtctttacctcgttcatgaatccttccaaaacagcaagcaccgctttgccgtcgatgccggttctggcagatatttcctttacgatttccgatttagtcatttctttataatttgaaaattagcgtgcaaagataattaatccaatggattatttaaagtctggcatccgcagcaagccctgccttcgcccaatgaagtgttaaattgttgcgtatgggtcaagttccttaatccgcttacacaaataatcaaagcgtttcttggtaagcggtgtgagtgtatcgaggttcttgccatcgaaattctctccgaaaataaggtcgtccactcctatgccgtgattgtaattctcgcgcacgcaatcacgcagaatccaaaggttatgcaggttcacccagtcggctgtaatgtttctgattttactgaacagcagcgcagcagtgtaaaggtagtgtccgcaatggttgtagtcatgcaacaccagcttgccctggtaatagatgtcgaaatccttgttttcttcatcttcctttgtatcgcagtagaagaatggaatgtctttcagaccgtcccaattaatataagtagttggcttcataatatcttttttgaatacgctacataacctgttatttgcacactttccattattcacagaacatttgatgaaacacttccttcagtctttttatctcactgaaattcaaatctccaatctttcttttcagccggcttttgtccaccgtgcgaatctgatccgtggctatctccccatcacgcccggctacagaacacagaacccggtaaggatagttccttatggtggaggttatcggagcaatgactactattgtaaggtacatattcaaatctgaaggagttacaacaacacatggccgtgtctttgccatttcacccccacgggtagggtctaactctacccaatacactccatactgttctaccatgtccaatcctcaaacttttcatcctcaaacacatcagggataagcaactcatcatccccattctcatgggcacgtttggcagcttccgcccatccctgccgtggttgtgcctttatcacaatattgttcccgtccaaagaaatgctcacagccgatttcaaggacaaacgcaactgtttcaatatctcggaaggaagtattatccccttgctgtttccaatctgaataatgtttgttaccataatgttataactttaaaattgattatcacaacacaaatatagacaaagttataacaataccaaaagaaaagccaacttttttccattttcaccgataacccggccaacggctgcactcgtcgggaggctagtgccccccttgccgtgcggcgctccccgacctatgattcttatcatgtcttgtgtccttttctccgcttctaacaaacaaatctgcataaaatatagatttgcgtttccatttgaattttagttatttgataccctaactatgaatagcaaacagataactgatttttaaaacagcagaatgtttctgttttattaaaataaaaagggaacaaatttttaaggtaatacttacggaaaaaacagactttataacgtttctttttcgtacatttgcaacaatataataaaagcgaaacatataatggagaagcaaggagaaatcatactataccaaccggatgaagctgtaaggttggaagtacgtttagaagatgaaaccgtttggctcacacaagcgcagatagcagaactttttcaacgtgacagaaccgttattaccaaacatataaataatgtttttaaggaaaaggaattggaagagaaaagcaatgtgcattttttgcacattgctaattccgataagcctgtcaagttctttagtctagacgtaataatttcagttggatacagagttaaaagcgtaagaggtacgcaattcaggcaatgggcaaataaaattttaaaagaatatttattgaaaggttattctataaaccaacggctcaatgacatggaatatagaatgaacaatagattcttccaaatagagaaaaccattgctgaacatgatgcaaagatagacttctttgtacgcacctcattgcctccggtggaaggtatattctttgacggtcagatattcgatgcgtataagtttgctacagatttaataaagtctgccaaatgctcacttgtgcttatcgacaactatgtagatgaatccgtgttactcatgttgagcaaacgaaacagtggagtatcagctactatttatacacaaaataaacgcacagctccaacttgatttaaacaaacacaatgaccaatatcctcccattgaagctagaacctacaaaagtagtcatgaccgcttcttaatcattgataatacggaagtatatcatattggggcatcgctaaaggatttgggcaagaaaatgtttgctttctccaaactggaacttcctgcccatacgataattgatgtattatgaaataagctaatcacccatgcgagaagcggaagagaatataaaattcaagatggaaattgacgtattggttcccattccacgtactgtcacccgtgatttcaccagtttgaagcacctgcgtcaatggcagaaacggaatgacatcgatggttctctttactgttttgcacaccgggaatacctgctcaacgaaaagggagaatgggaacaatttaccgttatcggcaaacaggtagtgactatcggagaactggaaaggcttcttttggcaatgaagcaaaaggggttcaaccaatacagccgtgaggaatatgaagaattaatgtcttcatatttgaaaaagtgaagaattaaaaccttcattacacatttaaatacgaaaacaggatgaaaataggatatgcccgtgtttccaccaaggaacaacatctggatatgcaactggaagcgttgaaggctgccggatgcgagaaaatcttctctgagaaaatgaccggacgtcaacaaaaccgcccggaactggatgcctgcctgagctttctccgggaaggcgacacacttgtcgtatataagctggaccggcttggccgttcgctgaagaatatccttacgctattggaagatttcaagaataggggcatccaattcacctcactgcaagacaacatcagtacggaaggcgcaatcggccaactgatgaacaacattctcggtgctttcgctcagtttgaaagagaccttatctatgagagaacccaagaaggcagaagaatcgccaaggaaaaaggtgtcaaattcggcagaaagacacttatcaacaaaaacaacatcgccaagcagaaaagctgcatccaactctatgaatccggaacgccggtaagggagatacagaaaatattaaacataggcagtagcggaacagtatatcgcctattaagaaggaatggaattgcgctgaaatccgagaacaaaaataacaaataacgaataaacctctgcccatccttcaaagatgattctcaaagatcgtctgcaattccacctctcagcaagattataggaaagtccccttcacggggactgattttttttaattttaatacaataactccatgcactcctgtaccgctttttccaatgcttcttccaaacaacaaaaagcgtccgcattactttcggagtcatacaacacataatctccagccctcacaaccacatgccagaccgccacgttttgttctgtttgaaacgtatattcacgagtctgtatcatccattggatacatgctgccagtgtcgggcactcgcacatatacatcggggtattccttccctcaatatcggtgcgtagcctatcctgtttgtcataccaatactcacaaggcacgtaatagtataattccttcatcataagagctgtgtcgctattaaccaatctctctttgttgatttgtgtaatcaaattttccatattagcattatttaagttgaacatctgatttattcttcagctagattcaagaccttttcattttttgtatcgggaaggtctttggtcagccgaccttttttttgatgtcattccccatctgagttctgagccttttttcggcatatcaaggtctggattgcaagcaataagccaagtttcacttatggaaaatgtcgggaagacacttcttcatcgttattttccatacagtaaaggcgcatggccgtaacttgccatttgcggaatcccgaaacctttgccgagcaaaaagccggactcggatcggaggaaagaagccgggggaggcagcccacagaaagggcaatccgatacaatcaagaaattaacctgctatacccttgtgcgagtgaaataatccatcatagacactacatacctaagtagtggtatcaatacaccgatcacatatatcatagcgtagcccaaaaggacaaaaggtaatgttttacgataaagacatgcaacagcgagcaatataaacgaaaaagaaaagccataaaccccatattgaaaaccgggtatcaactcataaacaggtacgggttccggatgaagcatggctccggccacaatagaataaaggctggtcaataatataagcagcgtatataagcaactcttaagaatcctgggatcattccttttacaatagagaatcgttcggatatcacttctaagaaactcaatgcccagtaagagagccaccataacgcctgtatcaaaagtagaaaatacattcattccgatcacctttggcgcgaagatatgtatttattctgaaaagccacgtctttgcgtattttacgatgtcgcatccgatagtccgggaagcatttttttggttcttttttggggtgactgccaaaaaagaaccccgaagccgaaatcccgggcagacgggatttctcccgtccaccttacctattttgcaatcttccctcgtccgcatagctataatagttattgcctgccacaatcacatggtcaaccaaacggatgtctaatgtttcagcggcttttttaactgcttccgtcaagcggtcatccgcactgctgggcttgcgtgctcctgatgggtggttatgtaccatgataaaagatacggcgttataatacaatgcctgcttcatgataacccgtatatccacaggggcggtatttatcccgccgcatgagatacggactttacggatgagtttggacgaactgttcagcaacagcacccacatctcttcagtagctatatcgcacaaaacaggatgcatcattttataaacattattgctggataaaagcgcaggactttcaacttgcccttctttcagccgtttatatagctcaatcgccgcataagcgacttttttacggctgggtgttagtgtttccagtacatcagacaagcacaatccttctatttccatctgttcatacttatattcttcacgtttcagtttctcactgttcgtcaaggtataaatcaactcgctgttttccatcacccgataaacgtcattcacttcaaatacggttctcttcgttttcatactgccaaaaattaaaagattaatactcgcaaacatcgcttgtcgccccaaccataaatttttcctcaactgattgggaacagtgcattgaagagaaagcgggaaagacggatcagaacgggattgaactggtaaatactacctcccggaatgggaggatggagatttggcttttcaatatcgggcgttccggccacgcctaccttcgcaatgttcctatcagttcaggaaaaaatcatcatacctctcttccggcatagccggagcgtagagcgttagggatagcagggaaaggcctggagggtaacgaggacttgcaacgaatagcccggtcagaagggaacgccctgaaaaactaattcggatacagaagatgaacagaaccgccttccaatcatataaaaaagcgtgaaaatcaacacatacttccgaaaaatctttttccgaaagtacgtatagggcatgtgaagggaaaatttattttcccagtcatttctatgttatcgctttggggatatttaaaggggttaggagtttaggtctttattatgtattttggtggatggttttacacagccgataccttttatttaaaaatttctctcttttatttcactgatataccgacatataaaaaaaacagggattacctattcccttcattaacgggtggacggttttacacagctgacaagtgaaaccggacgcttttacacaactaaagcaaaaggagtggacggttctacacaactagaagcaacaaacgggacacttctacacaactaaaacaggcaaagcggatgactccacacatctaatcaccccaatagggacacttctacacaactaattctataaaaaaccgtgaaacgtggacggttctacacagctggatcgtccatgttcaccgccccgtccgtctccggagatatgaactcttcaggagcaggagcaacttccgttccattggcactctccaactcttcctgtgcccatccttccggaaacctgccgaatacagccacgaaatcactgatatatatctgtttcttcttttctacgctttccggggagtttgcccataaaaggaactctttatacagtccggcatcttcctccacctctttgatcttcttcctcctgacagccatatccgtgtccgggtaggcaatctcgacatacagcccaagcaggttcttatagaatttcttcaccacgacagcatattgtccttcatcaaaatagtgcagcgtatgcctaggaaacgagaacaacacggtatatgcccatctctcatgatcgcctttcacaaaagagaaattgaaattggtatatttcaggtaagtattcatctttttcagtatcgaggcgaccttctttttccggtctttgggttcggcaatctctatgccgagctttttagccagctgatcgactgtcagcacataaaaaggagcctcattcttggtggtcttatacttgatcaggtaaaccatcttggaaagttccagatagaaatagcggtaacggctgggcaggctacggtaatcctgaagttccaagaggttatagagcgagaacatgaaattctttatctccgggcttaccactgccgagtacagccttttcgttgacttcttcgtcttgaaatcggtcattatgtcgaaacgtttcaagatctgcacgaaattataggatgtacggccatcctcgccaatggtcggatagcagaggttctccaatcccagtttatagagagccgcctcaaaaaccgtctcgataggatggctgattctctgtcctgccgtgtcggtacatacatattccggctgcatattctttccgaacatggccgcgagctgccggctatccagcttgcgctgcaagttggtacggtcataccccatcttacggcagaagtcttctacggagaaccaggaagtcccgaacaagtctttgaggtgatagctgcccaggtatatgatcagatcgagcatgacatttccacctgcctcatacaaccgttcaatcagcacggaattatagctttccccaagcaccctagggacacgaatcagttcttttgccatgataatacttacaaaatcaatcctttctctgttttcattgccacaaagataggcataccggccaacatacgcgtcataattatcaatcagttttaacggtatgaccggtatgggaaaaggagaagtactttcctgaagaatgctttatccgcccttcatcagaaagaaagcatcttacacctgtaccccatagacatcctatattactttttcagttcttccgataaaaaggaacggtctatcaatacttgcaccaatggtttctctttgacaaactcatcaagctcacgctttatcaatttattgcccaaccctatgcgtcgtccaaattcctcgaaatccttccgccctacctgatgagcaatttgactccacattgtcatctgtaatcgactcaaccctcggtctaaggtgtagatcgttaggttatcagtacagcgaaatcatccgttctctcatgagtatctacttctgtggtggctcatgtattgaggatgtcactactcatttgatgaaccatctctcgcttcatccgacacttcatacttgtagttctgatactatcctcagagcgataaaggaactgacgcaagaaaacatctcatacacatcagatacgggtaagaactacgatttcaacacggctgacactctcaatactttactgctcaattgtatgtttgcatctgaccaactgaaagagggtgagaagtatgatgcaaagcctacatacaagaagttctctggttatcgccctggcgtggcggttattggtgacttgattgttggcattgagaatagcgatggtaacacaaaagttccatttcatggcacgttttctcgccatggcagagcttaagtaaacttagctctgctcatctggcttaacgaaaaccttcgttttcatcagaaggacacgctgaagaggttctttgagagatttgaacagaacaggctcactatcaatcgtttcagagctgattgcggatcatgttccgaggaaatcgtggaggaaatagagaaacactgcaagtccttctatatccgcactaaccgctgcagttcgctctacaatgacatatttgctctcagaggctggaagactgaggaaatcaatggcattgagtttgaattgaactctatccttgttgagaagtggaaaggtaaggcatatcgacttgtgattcaaagacagaaacggatggatggtgtgcaggatttttgggaaggagaatacacataccgttgtatcctgactaacgactatgattcttccgtaagagaaattgtcgagttctataaccttcgtggaggaaaggaacgtatcttcgatgatatgaacaatggtttcgggtgggacagattgcccaaatccttcatggcagagaacacagtgttccttcttcttacagcacttatccgtaacttttacaaggccattattcaaagacttgacgtaaagaagttcgggctcaatgcaacaagtcgcataaaagcgtttgtcttcaggtttatctctgtaccagccaagtggatcaggacatcaaggcggtatgtgctgaa

SEQ ID NO: 253 - DNA, 54996 bp, Bacteroides thetaiotaomicron
  source 1..54996: mol_type = genomic DNA
agacaattatttttgttaaaaatagtttataatcggctgatttttaacgtattatcttttccctaaagttttatatattttgggtgagagataaggttttataaacggaatattccctttagggaacatgaagtctataaaaccgaatatccaatgccttgcttttgtaggtgcttcatagaagcggtgaaaaaagcaaagcattggatataccttagaagggtgggtgggaaaatgcgttagggattgcagcggaaagcccacagcgtagcgaggacttgcagcgaaaagcccgacctgaaaggtaacgccctatttatttcttctattcatcaatcttactttttcataacgtaaatacctatacaaagtagccttacttccaatgtgtaaaattctacatatttcatctatagaataatcccgattttcatataaacgctttgctgctatagcttttctctttgcatcttccgataaccctataggtcgtcccgtaagtttccctcgttcttttgcagcttgtaatccagccctagttcgttctactattatttcacgttcatattcagccaatgaagcaaaaattccaaattgacatcttcctaaagcactattagtatcaataccatcaactatgcttttgaatgcaatttttcttttctgcaaacaatcaactatataaactaaatctttcaaagaacgtcctaatctatctagcttccagataacaaaagtatcaccttctcgcaaatatgcaagggctttatctaattcgggtctatcctttactcctgatactttttcctcaaatataagtttgcatccggcttcttttaaagcatctagctgcaaatctaaattctgttccctcgttgaaacacgagcgtagcctattatctccattttatttaaatccaagtttcataaattcaactattcgcgaaactattttaaactagggctttcccccctgttattacctctagtactattataaatcaaaagtacagaaaaagggtcgattaatgaaacttttaaatttaagaatatgagttattcacaatttatcatggctgtatttgccatttatgtagtttactacgctgcaaacatcctgtatgatgctttcctaaagcaaagcaaaaccaatacaggtgaagaagaagaaattatttcaataggagaggaagaagaaatacctcacaaagttgtagatgaagattttgaaacaggctcatacgaaaaagaagatgaaaaaaaagaatctgaacagaattatgtatctgtaaatgaatctattgaaatggaagttgaaacacaaggtattccaatggaacaacttcttgctaaagggaaaagcatgttttcacacgtaaattttaacaaataaacaactaatttttattcaaatgaaaaagtttttttcaaaaattgctcaaagagcattcgctttagccattagcataatggtagtaactaacacttttgcacaaggtgctgcgggaattgatgcagctagttctgaacttgcaacctacatggaccccctaggaaacatgatgatgatactaggaggtctagtaggattagttggagcagtgcgagtttatttaaaatggaactctggtgaccaagatgtacaaaaggctgttatgggctggatggggtcatgtatctttctggttgtatcaggtgttgtcgtaaaagcattcttcggaatctaatatgtcgaaagagtatccaagttacaatgtatataaggggctacaaaagccccttattttcaaaggatttaaaggcaagttcatatatatcggtggagcttgtattattagtgctttacttttatgtgctattgtttctactctggcttcttttatgtggggaggtataactcttgtaatagttatgtttggagggttaggaataacatcgcaattacaaagaaaagggcttcacaggaaagataaacgaaaaggcatatatatagtatcacgcacttttataagagatagaaaaaaataaagcttatgaaaaagaaaagtgaatttgaagctccttatattggtattgaaacaatagacaatactcctatattctataaccgaaggggcgactattctgttatcattaaatgtgaaaatcctataatacagtattcagcagatatggatgcttactatgattttcaccacttatttactaatatcctcaaagtattaggaactggatatacaatacaaaaacaggatattctatgtaaaaaatcatttttaccaccccagaataggaagaacgactatttatcaaatcgttattttgaacattttaaaggacgaatatatactgatatttctacttatcttgttattacaggagaagtagaaaggtctaaattcttttcttttgaccctcgaaggtttgatacttttattagaaacatcacaaaagtattaggactattcgctaacagaggaataagagctaaactattaaatgaaaatgaaatagaaatatatataaaaagatttctatctatcaatttcaatcagcaaacagtaagcctaaaaaatatcaaagcaagagaagaaaatcttataattggagaaaaaaacgtacagtgcatttctcttgtagatattgacgaagttaattttccttctgttataaaaccatataaagaggtcaatattgggctaaggtttcctgttgacttactctcttttttgcatgatacaccaggtatagacacaattatctataatcaagtaataaatattccagaccaacgaaacgaagcaaacaaattagaaggcaaaaagaaaaaacataaaggaatgcctgaccctgcaaatgatttatgtgtagaagacatagaacgagtgcagtcggatattgccagagaagggcaaatgcttgtatatgcacattataatataattcttgctggtcttgatgatattagtaaggctatcaactatgttgaaacatctctttttgattgtggcattattattaataaacaatgcttcaaccaattagaattattcgaatgtgcactgccaggaaacgcaatcaacctaaacagttatgacaaatttctaacaacttccgatgctgcaatttgtcttttgttcaaggaaaaattacaagtaacagaaaacagcccttttcttacttattttacagacagacaaggattgcctgttggaatagatatgtccgggaaagaaggtgagaaaaaatatacaaataactccaacttctttgttttaggtccaagtggttctggtaagtctttctatgtcaactccaaagtaagacaatgggttttagataacactgatattgtattggtagatacagggcatagttattcaggaatgtgcgaatactatcatggcaaatacattacttattctgaaagcaagcctatatctatgaatcctttccgaattactgaagaagagtataatgtagaaaagaaaaactttcttaaatcattaattttcctgatatggaaaggtgcaaatggtgaggtcaaaaagcaagaagaagaaattatggatattaccatagaaaaatactattctttctactttcatccctttaatggttattcagatgcggaaaaagaagccatacgtgaaaatttactactcgaatttcaagtcaatgaagaagaatttgaaaacgaaagggaaaaagaagaacgcaagatactttccgaaaaaatagagaaattacagcaactagtagaaaaaggagaaggcggagaaaaaaccaacgcagaaaaagcgatacaaaacattctcatcgaaaaaggctttacacgccaagagcttgataatcctgaaactagattactttctataatagaaagacgaatccagaagaaggaagatatattgaaagaaataaaagttgaaagcttatcttttaactctttctacgaattttccctacgcattatacctatcatttgcaaagagaacaaaattgattttgatattactaactataagtttctattaaaaaaattctataaaggaggacagttagaaaaaactcttaatgaggattttgacacttccctttttgaagaaccctttatagtttttgaaattgatgcaattaaagatgaccctgaattatttccaatagtaaccttaattattatggacgtttttattcaaaaaatgagattaaaaaagaacagaaaggcattaataattgaagaagcatggaaagccatagctagccctatgatggctggctatatactctatttgtataaaacagttcgtaaattttggggtatggcaatggttgttactcaagaactggaggacataattagtaatcctgtagtcaaaaactctataatcagcaactccgatattatatgcctattagaccaaagtaaatttatagacaaatatcaagaaatagcaaatcttttatccctaacggaagtaaatcaaaagcaaatatttaccataaatcaacttcccaataaagaaaaccgtaatcggtttaatgaagtatttataaaaagaggaaattatggaaatgtatttggagtagaggtttctctacacgaatatttcacatttactacagaacgaattgaaaaagatgctgttggatattatcatatcatttatggtagtttccaaacaggattggataattttataatagacctaaaatcttccaaattaaaaaatatggattgggttttacaagtcaataaggtactagggtatcactccgatgatggaagcctaaaagatatacttaacatcataggggaacaaccattatataagtatatcctagataaatacaaatggattacaaaccgttaaagataatatcatgaagaaaatcctatttattttagtggtagcatctactttaacccaagttgcatattcgcaaaaggcagtcttggatataacctgtatggaaacacttatagctaatcataaggtgcaacatacttctttctctaaagtgaaagagaatgaagctcaaataagccttatacaaaaacaaatcagtgaaaaaatggttcagattgaatttttccaaagcaaattttataatagcctaaaatctgtagaagccatcataaaaacaggaaaagatattatctactgcactgatattgcagcagatattggtaaatatcaaaaacaaatggttgaacttgctgtaggtgacccggctttattattggtgtcagcaaaaacagagctagaattagtaaatcgcactgcggatttgacacaatacatttatcaggtcgctattgtcgggacagatgtaaaccttatggataataagcaaagaatagacttgcttaagtatgttattaatgaactaagaaacatgagaggtatagcatacgctgtatgccgacagatgaaaacagcaaaaagaaatggagtattacaaacattagctccgggggtatttaaatacaaagataatcgttcaaaattagttgatgatttattacagaattataaagtaaaacctaaaagataatatgaaaagagtgcttttatttttttccctaatgttgattattggtacttctaatacctattcccaaatgcctgtaaaggataaagggaaatggagcgtgcttaataatatggaatttatggatagagtacgactacaaccagaatggtatcattactggatatggtataaaaaggttttgggtattaaaattcctttgccgggcttagggttacacgacaaatacgggaaggaagatagacgtaatttccagttacaagaaattcccatgatggcagccgtagagtacaataaatcagaaacagaaaaagaagggtataatgttgataccatatatagacaggaactcttcaaatttggagataaagaaattgattatcaatatactttaactaaaaatcgtagaaatgatattcttaatgatataaataaaaaacttgtcgaatattcttctaatggcggtaataaagaacatgttgaagttataactgatgaagttactagaataaaaaagaacatagatataatccatgattcacatatgagtaactctaaaaaaagggaagcctatttagattttgataaagaactaatagaggttctttcattaataacaagattgaataatataaataaaacaataatgagccatgaatgagttaatagataaattcttatttgaattatttgatggactaagagataaaacaactgttctattcggagaatttattgcggatgcacaagcattggcagcaatctttatgttgttatattttggagtagaaagcttcaaaatgatgagtggagataaaaaattagagattatcccgttattgcgtccattcgcactgggattggttcttatgttctggattccctttattaatctaatcagttatcccggagagttattaacagcacgaagcaaggctatgtttacgaatcagatagaagaagtagaattactttctcgtaatagatatgcactcattgatagcgtagcagtagagttattacatacttcattagaagttgaaagagccgaaaatgaagttaaggataagaaatggtatgattttagtatagacttctcagctattggagacaagatagctggattatatgtatatgtagtcgctaaggttaaaatgataatgtttaatatcattgaatttattgtcgttactttttggcaagtatgtacctattttgtctttttcctacaaatcatattcacaggaatattagttattcttggtccactagcttttgcattctctgttttacctgcatttcgggatgcttatatacaatggatagctcgttttgtcagtgttagtttatattcatgtattgcatatatagtattatcaatttctttagtagtaatgcaatatgggatagaaagagaaattgaaattttagaatatgcgcttagaaatgaagctgcatttgtcatgtatgtcggaatgacctctggaggtgtcaatagcttccttcttacagcattacttggagcatttgccatgcttacaataccttttgtttctacatggattgtaagtacaactggagtagggcaagcagtaggaggcatggttggaggagcagccatcgcaaccaaagctgtagcagctccggctacaggtggagccagtgcagctatgtaaaaagattcattaaattttaaattcacataatcatgattattaaaaacttagaaaataaaatcaaattagccggaattttatccattggctgttttgcaactagtatagttatttcaggtatggtactagccttttgtttctctttagtaaaagctgaaagaaaaaaaatatatgttttggataatgatgtccctgtactagtaaaacaaactggtacagaagtcaacttggaagtcgaatgtaagagccacataaatctattccacactttatttttcacattaccaccagacgatgaatttataaaatacaacatggaaaaagccatgtatctaattgatgatagcggattaaaacaatataataatttaaaagaaaaaggatatttcaacaccatattagcgagttctgcaacagtaacaattatgacagatagtatcaaggtggacatgaacaacctatcttttgagtactatggcatccaacgtatagagcgagaaacctctattctaaaaaggcaacttgtaactacagggaaattaagacaaattccacgtactgaaaataatcctcatggacttattatcacagattggaaaacgatactaaacaaagacctagattataaagtaaaaaagaatttctaatgaaactgtttaaacataaaaagaatgatagaaaagaaagtatcaagactaaagccgagcaagctacagttgttcttcttactaaaatatttcaaaagttcggagttaataacgcttgtgaacgcttattggcgtgggctgatatacaccgtaaagctatgtttggaattacgatttcattcctttctttcgtcacaattctatcattagtaatgcgtccagaaagaaagccaatgcaagttttcaacgaagaaaaaagcaaagtacaaattaacattgatagtaccctacaaaaaaaacaagtaggagttcacgacttgttagaagtgattaaaatgcaaaatgaaattaatgagctaagaaaaaatgggaaattaactccagaagacactatacgaataaaaaatttatacaataaattaaataaatagcgtatgaaacagattgatattaaaaagcctaagtacatcattccgatactcatcctaccttttattctagggataggatggctagttaaggatatgataaactctgccccagcagaagaaactacattagtagaaacggaagaattaaatcttgatattcctgatgctaatttagaaaaaagagagataaaaagtaaatttgaatcactcaaaggagctttcaataaatcttctgattattcatcaatacaaaccatagataaagaagaagaagttagcgaaattgaaagttctggttctctttactccaatgatgaaataaggcaaattgacagtttaaatcaagcttctagaatccgagaaaaggaattggaacaacaaataaaaggatttcctactatagatgaatcaagtcaaacagaaactaggaaagctcctgaaaaatccaagatgcaagaagaaatggagctttttaaaatgcaaatggcttatatagattcattacaaaatccacgtcctagaacacctcaaaaaaaacaagatgaaaagccaaaagaaaaggctatagaagttgtaaaagcgaaaaatcccgcagaagtatattttaatactgtagggaaagaacaaaaaacttcactaatcacagctatattagatgaaactttaaaagtaacagatggtagccgagtacgcatacggcttctagatgatataatgattaatgacgctcttttaactaaaggcacttacctatatgggaatgtatctggctttaaagctcaaagagtacacattaatatttcctctataatggttgatggcagacaaatgaaagtagatttatctgtatatgataatgacggacaagaaggtttctttgttccttcatcagcttttagagatttgagtaaagatgttggagcgcaaataggaagccaaactatacaaatgaacagccaatcagaaggagtagaacaattcgctttaggtgctttacaagatgcttaccgtagtacaacccaagctctttccaaaaacatcaaaaaaaacaaagccaaattaaaatataacacacaagtttttttagtaaacaacaaagataaagaacaataatatgagaaagatttttattgcattatgcacaatggtttctgttattacaggaaatgcacagaacacccctattggagaaaacatcgagcttgcaggtgaaaacccagaagaactaaaggttatatacgtcaacaaagatgtttcaacgcattttatagctatggaagatataaaatatgttgatatatcagtcaatgatattgttggcgatattcctactggtaactctcttagaataaagcccacaaaagaaggagctagtggagttatcaccattgttacagaaagatttttcgtacaatatatgctagtatatagtagcgatttagcaaaagcatacactcgctttaatatcccttatgctgatttacgtagctatatgaatccagaagtgaacttaaccaaagcacaaatgtatgattacgcacatagaatgtttatttcaaaaaataaattctatgatgtttccagtaaaagtaacctaatgaaaattgtactaaacaatatctacacattagataagtatttctttattgatatttctatgattaataaaacaaaaatacgatatgatatagaccaaatacgcttcaaaatagaagataaaaaacaaacaaaggctactaattttcaatctatagaaatacttccattgatgcaagttaataagaatcttgttttcaagaagaactatcgaaatatttttgtctttgaaaaatttactttcccagacgaaaaagttcttaccatagaaatatctgaaaaacagatttcaggacgtactataacattaagaattgattatgcagacattcttcatgcagatgcttttactgaataaaattttacgattatgaaaagaatagcatttcttgttatcaccttatttttttccctaaagtcaatggctggtgatggtgataagttttttaatatttcaggaggttggcaatggaaaaataccgtcaatgcagttgtagggctggagtttgaaggtaaatatcacaatgcttatgaactatatattgatttagctacagcatatgataaatgcccggtatgtaataaggtatgctctgatagtttctggagctataaaacattcggcataggtgcagcatataaacctacaatctcacgaggcaaaaacagtaatttaagatggcggtttggagcagatttaggagctaacagaaaagggtttcaggcttccattgatataggtttagaatatagctattcatttagaaatggaatgcaagtctttgtaatgcaaaaaaatgattttgtcttttggacacgtgaccatttccgaaatggattattagtaggtgtcaaatttccaataaataattaagtatgaaaaaaatatatataattctattatccattataggggtaatatcatcatgtacaaaacacgaagatattatagacacatcattacagccgggtagtatcttatgtagtgatggaagtatagtgcatccctcacttttttcacccaatgaaaaagaagccattggagttgtattttggtgtaatgatgggaataatcctgatataaaagaaaccgcttatgccgtttcattagaagatttagaagaaaatcctttaatagatacagacgaggatatagctaatgtttcggaagatgaaaacagctttgatggagcagctaatactgccgcaataatgaactttgctataaaagatagtttagcttatccagcagctcaaaaagctatagaatacgcaccaaaaggtgttacaggttggtttattggctctatcgcacaaaacaaagcaatctctaataatcttgaaaaggtatattcttctttctcaatcattggaggaacgcactttgatggttggtactggagttctacagaagatggagcaggaaaagatactcctaaagtgtttgcactaatttcttcattaacaaaaggaagagcaaccagtacaagcaaaagaaattcatttaaaatcagacctattatagcaataagataatcatgaaaaagaaaataattatactagcagccttcgttgttacattttttaccgcatgtacttcaacgcatatgataactttcagtaacgctgaactaagcgacaaagaaaaagacatgatagaaaataatagtaactattcaaccgcttcaatagttggtggaagtgcaaaattagttaaagaggaaagagataaagctatccaagaaaagatagaagctagaagaaataaactaaaagctattgatggcttatcaatctccagctataaagataaaaatggaaaagaacagtttaaagcaacagctcaaagtgaaatcctattcaaatttgattcatatgaattaaatgaagaagctcaaaaaatgctttctgacttatgtaatatcattagtgaaatacccaatactaagattaaaataattgggcatactgacaatataggagaaaaacaatacaatatcatactttctaaaaatagagcagcagcagtaggaaattaccttagaaccgctggtatagaaacaaacaacataacagaagatggaaaaggatatagcgaacccattgcagacaatacaagtgaagctggacgtgctaaaaataggagagtagaaatatttatcacaaatgatgaatattaaaaagagagatttctattaacaaagaccgggaggtaaaactctcggtctttgttttatagtctggaaagaaattgataccgtacttttcggagttccggcactgatgggcaaacatggcatgatgaaatgataccgaattatcattcctggcacaccctgcagaacgaccttttgataccaaatacaaaaagctgccggaagccggacacaaaacattagggaaaaagaacaaagagaaaacactatatataaataatatatgaatatataatatatgaacctataaacatataatatatgattaatatactccacttccagaaagagcaacacgaagaatcttcttttccctaaagttctttgtgtcgtttctctctatatctgaatacagaaaaacggctgcatcataaaagaaacgataccgacaccattcaggaactatcgcccatcagcaaaaggattgcatctaattgataccttttctgcctgcactggagagaaaccgggaaggtatttgataccgtacttttccgggttctgcccggcatggacgataagagaacattattatgataccaaaaactttagggaaaaataaaacttcggcagtctataaacctaaaaccatttttaacaaaaataattgtcctattatttgcgacatttatagaaaattactatctttgagtattgaaaataaagagataaataaacttttaaagctggtttggctgccagtataaagaacagcaaacaaaatcatgaatatcttaagatttcttttaagtagctttttatgggctatgggtggaatttttgtattagcaatctatgcgtatagtgaactagtctatttgatttttatttgcattgcaatagtaggattaaccatctactacagaaaatccataataaaaatgtacgcagaaatctttaatgagttaggaatcaataagtatgttatacaaattaaaaatctaaagaaatacaaagaacctatttacaaactaatcaatacaataggtctatgatgattgttttttctctatctttgctaaagacatcagcaagatagctatataaaattagaaaataaatagttatggaaactaatcaaacatatcaaaatgaacttggttcggctatgctcccatttgttatgagagaattggttgatacagtcatgaaaagaaaaacgctacctttagaagatgcgttatactatatatattcttccaatttgtacaaggcattattggacgagaacacaaaactatggtattcaagtacattatcactttatgaagcattagaaaaagagaaaacagaacagaagaaagtacaaaaggacaatccaaagatattgctttttcaaatgttttgtgctgaaaattacagggaaactaaaaatataagtgctaaagaaactcttttgctgttttccaatcatggcgtttttgaatttctatatgaaaattttgaaatgctgcacacacaagatacagagtatatattagatactataataacttatatcaataaaaaggcatgaaactatatcacggctcaacagttaccgtcaaatcccctaatatacagaaagggcgtaaagctactgactttggaaaaggattctatacgacaactaattttgaacaggctaagaagtgggcaatactcaaaagaaatcgggaacatggtaaaaaagcggtcgtttcagtttatgaagtccccgataatattcttgatagagagttttcagtccttcgatttgatggggctacaaaagagtggctggagtttgtagttaataaccgcagaggaaaaggaaaaaacagctatgatttaataatgggacccgttgccaatgaccagttatatgcaacaatccggctttatgaacaaggtgttgttacggctgatgcagcgattgaaatgctaaagacccataagctttttaaccaactttcatttcatacagtgaaagttattccattattaaaattcacagaatctattgaagtataaatcataaaactataatgaaccatgaataaagaaatgagcttggatgttgcgctcgacattatcgggacactccgcatgatgaagatagatgaaatatcagaagagaaggatgaaaacagaaaaaaaatactgcaaaaagaactttctgttctcaacacagaagaaaaaatagcaaatggattgttgcagtttgaagtttctgaaaatgtgcgcttatcagtcatggataagatacaaaactattacgcacctaaattgaaagcatattatgcaacgctatgaagtagaagccatctttgaacaaaaaaaagatggcttatttgaggacatcaatatatcatcacaaaagcctattgctataatcttaggtggacaaccagcttgcggaaaaagcactcttataaatgttgcaaagaaagaccatcctaacttagattttctcactgttaatggtgacctttacagacagtttcaccccaataaggaactaataaaagaccctattaaataccccattgaaacccagattttttctagcgtttttacagaaagactaatagaagaagccattaaacggaaatgcaatattattatagaaggaactatgagaaatccagatgtacctttaaagacagcacaaaaatttaaagatgcaggatttagagttgaagcatatattattgcagcccccaaggagtttacccaactaggactttacaacaggtatcaagaagaagtactaagtaaaggacaaggacgattagccgatattgattcacataacaaagccgtaaatggactaatgaaatctgcaaatcaattatacagtgataaggctgtagataagatttctatccacacctacttagcgaaagaaagaattaaagatttcaatctagtaaatggtgaatggagttgcaaaagtatgccatctatttttatagatgaaagtcgttcaaaacagatgaagaataaagaaatacttaacactaacattcaaagaggaaaagagcttattgaatccgtaacgaatcctgaagtaaaaaaaggaatgaaagaagctctgtcacaacttcaatcttcactagaaaaagttcaaagacaagaaaaaggattaaaaaaaggtttcttctgattcttccaaaaagagaggactggcttttccaatcctctttttctatttatttgcgtcttaactcattatctatttgctgtgaaatttgtcctttaacggttctgattacctcattaatataatcaagaattggcttagggtctatagttttatctttgtattccatttgaaaatgtaagtgttctcctgtgctgcgcccggtacttccactaatgcctattggttgcccagcttcaacagcttgtttcgcatttacaagcacactgtataaatgcccatagatagaagtaaaatcaccatgacgcacttctacataattgcccaaccctttattttttcctgtttttacaaccattcccggcattatcgaataaacatagtcgttgttgcctttaaggtctatccctctatgatttgctatttttccagtaaatgggtcttttcttttaccataatgggaagttatcaccattgaatcaatgggcaaagataaataccttctttgcttccagtatgcaagtcgttctgtagtcaaagcatcattgacgacaacagccttttctttttcttctatcaatttattttctgtcgttgctaatacaggttccgctttaggaatatcctttttctgtaataccgtattaaactgacagtagccattcactgaaaaaaacaatgaataagtaaaaaacatgataaatttattcttcatattgatatttttattacttttgagcaaaaatatacattacatggataaaaagcaagctatttttaatgaaaatgatattccatataaagaattagaactaataggaatatcaaaaaaacagatatggtctttggataaggcaaatatcacagctctattatctggaaagagaaccagtttactagacctttcttttcacgataataatggagaagaaataagtatgaaaggaaaaataagtttgtactggaaagatagcaacaatgctggcgttaaagttcatccagtcagaccagaaataatgaatgatataaaccttaaaccaaaggagttagaacgacttcaagataacgagataataacaaaaactattaacaatgaaaaatatctcgtacaattagaccctgaaacaaacgaattgcttaaaacaaaaatcaaaagtatttcaataccttcaaacataaaaggtgttgagctggataagcaacaaaaggaaactctaaaatcaggtaaggaattaattttgaatgttgacaaagaaaaaattgccataagattagatttaaataatccaagaggaataaaattcctagacttcgagcagaaacagaaaatagcttatgaccggcataacccacaaattataggaactattcatactgataaaaacagaaatgaatatatagaatacatgaaaggacaaaaaacaacacttggaaatgaatcgcaatctaaagtagaacataaattcaaattataaaatggaagaaaagaaaaaatttgaagctttgcaatatagttatgaaaatgccggacaattccgagcaatagcagcaattcttggatattcagaagaatatcggaatggtgatattaccttttccaaaggtaatgaaacatatacttatccactgaatacacttaaacttggcaatttaggagataatagagaatctttattagagcaatctaaagaaagaataatcagtttctttgataaagaacaagctagcaataatttccaagaatatagccaatatttacgagaaaaccacaatgttgcaattataaaatgggatgatataaaacaaggtactaacaagaatgaaggatataaagacggatttacagtcattgaccttgaaaataaaattgcatataaaggagaagacctttatcgatatgcttatgaacaaaaccaaaccctagatggtaaaggttcatatgttgatatagactggaacaagtttaatgaagtaggagttaaaccggaaaatttaagccccgaagatattgcaaacatcaaaaatgggaaaaaaacaggtatgctaaatttttccattgaagatactcccggtaatagaacacttctagacaatgaaaaagtgtcttataaaacagaaaatggaaaactccattttgaggggaaagcaacaactcttaaatatataacagccgagaatacacctgaaaataaatctaaattaaaaaccaacgaaattgatttcaaagaagaaggtaaacgcatcaaaattgatggtatcaatgctagaaaactagcaatcgcagctattacagtagtttacccaatcgctgggattgctatcttgctcattcctaaacgacaagaaataaaaaatgatttatcctttactaaggatgaaataaaagccctaaaagctgataatgtcgtagtaaagactaattcaaaaggagaaagaacattgcaccaacgtgacaaagatactaatgagatagtatcaataaaagcaaaagacattcatattccccaaaaacttggaggaatagagcttactcctatgcagcaagaaaatctcaaaaatggaaaagaaattaccattgtaaacgaggaactaaacaaagctgcaaaagtaaaactagatttgaatgccagaaatggattatcaatcaaagatgcaaatactatagaaattaaagcgactgaaaagaaagaacaaacaatagggaaagaaagatatatatctgataaagaaagattagagtttgtagcccaaaaaggagctaaagggattgatgaaatttttaaagataaacccaccgaaatggctgcctttttagagaaacataaactttctaaagattatgcttcttacaaggaagtagaaaaaacatattccagctctagggaagctactaaacaaactgtcggagaacaaatatctacccaaatggataaaatagatagttctattaaagcaacagcgaagcaagaagcatctattctcggatatggtagaacctacggaaaaaataatgatactccaacaatgaaactataatattatgctaacatttgacgattataaggctaaaatatccatcattcaaatacttgaagatttaggatataaacaagacattagcaaaggaaaggtttcgcctgtttttaaactgacagacggagcaggtaacaagttggatgaaatcatcatcaagaatcctcatagtgtacaagaacactactatgataggaattataaaggtggagatttaattcagttcatcaaaaatcatattaacgacttcccacaattccaacatcaaaatacatttgtgcgaatcaatatgattttaggacattacgcaaatgagccttatagtcctaaatatgaagcattcaaagttgtaaaagcagaaaacaaatcttttgacagagatagatataaagaatttcctactacactcgctgatttaagatttctcacaaatgaaagaaatataaatcatcaagtcgtagaaaagtttctaccatttatcacaagggttaaagacttacaaggaaacggcaattattataatataggttttccctatattaatccaaaagataaagacaacaaagtaacaaattacgaattaagaaactatggattcaaaggaatggctgccggaggtgataaaagtaactcgctttggattgctgatttttgcccacacccccaaatggcaaaacatatatactttgcagaatccgctttagatgctatgagcttctatcagctcaatgctaacaaaatcaaattagaagaaagtgttttttgtagtgtaggagggtacatttcagttaatcaaataaaaaacactttattgcgatacccacaagctaaagtacatacctgttttgataatgatttaaacggtaatttgtatgacattaaagtgtctggaatcattagtaatacagaaatgacaataaaagaaaataaagatgatgtgctgtttaaaactaagggtagagaattcactattaacaaaaatgacgtttcactagaaagttttagggaaaaaagcaaaataatagctcctatgatttctcataaagcagaaaaagcaaaagatttcaatgaaattctaatgaaacaacatgaacaaaaaaaaagtattaagttatgaatgatggaacaaacatagcttctgatgatattatattaaagcctaaattccgatattggttaatgaagaatttccttttaatcacattagcgattttcgtattcatttttagtaaatatataagagaacatgaattattaaaatttatcagtggaacgatattagtattgttgatatttataattttctacagatatatttcaatgttactttgtacaaaatggattataactagagagcaaataaaaatatatcaaggagtgctttcaaaaaggattaactacatagaattatatcgtgtatatgattatgaagaaaagcaaagttttatccagtctttaataaacaacaccaatatctacatttattctggcgataaatcaacaccagaactactgatgaatggtcttaaagctaatagtgatataattcaaaccatcagaaatagagtagaagaacaaaaaaagaaaaaaggaatatatgaatttacaaacagataatgatatgaaaagagtgcttttatttttttccctaatgttactgttaggcaacataaaaggactagcacaatctattgtcattgacccggtaatgattggaacattggtttattcccatcaggagcaacaaggtgtattgaaagacatacaaagtgaggaaacaaaaatccgcaactttcaaattttaatccaacaaaaaatgaatcaaattcaatccttacaggagaagacatacaactatctttctacagttaatgcagttgtgaaaaatggaaaagatattatttatgcttcaaccttagctagagacatagctaaataccaatccgaagcagctaaatatgcagttggagaccctaaattattaaccataattgcaaaaacagagtatgagcttatcagtcgaagtgtagatttaatgatatacataaacaatatagcattgcaaggcggtgaaaaaaatcttatggataataagcaaaggatagatttatgtattcatgtggtcaatgaacttagacgaatgcgaggacttgcatacgctgtatgccgacaaatgaaatccgctaaaagggctggagtactaaaaacacttgtacccggacaatttaaatatgtaaatagtgggaaacaaaaagtagataatattttaaacggtattaaatggattagtaaaggaggatattaaatggataatgatacaatcaaagatttaggcttatgccctatttgccagaaaggacacataatgaaaggcagtttaggatattcctgtaattacttcaaaaacatgaatgacaaatgtacatttaatatttatcattcatattggggaaaagagattacagaagaaatagccaggcaattaataacaacagggaaaacagatatatttcatgacttccataataaaaaaggagttcctttttctgcatatctgactatcgaaaatggaatcgttattccttctttcgtaaatgaagtattagaaactccgtgtcctgtgtgtggtagagaaattgaaattttactaaatggatatgcttgtaaagggtattcacaaaaggacaaggacaacaacagagtttgtaacctctatatacccaaaactattgcacaaagagaaataccattggaagcagcagaaatacttgccagaggaaaaaaaacaccgtttatgactggatttaaatcaagagaaggaaatgatttttcttcacggctggttctaacagagaacttagatatttcttttgacaatacattgtgtaagtgtcctaagtgtggaggaaacttatatataaacaaaaaagcctataattgttccaactatagaaatgaagccataaaatgtgattttgtcatttggcgtgaaatgtcaggacgttctataactcccgaagaagcaatagaactttgcgagaaaaaagaaacacctgtgttaactggatttcatgataaaaacgggcaaccgatggaaagaaagcttgtactgaacgatgattttaaaataaaactaatatgaaaatagaatttataatttatagccatttttttaaagagagaggaatgaaggtaaagggtgattggaattttccgcatcttccaaggataggcgaagaaatttcacctcacattataatgtttcagaatgaatttacctatcaaaatttattagaatatctaacagatgaagctaaaagtgattttaataaattcaatgatggtgaagatgatttagaagggaattttaaagcatgggtatatgatgttatctgtgaggtcaatatagttgaatcaatacattatagaccagatacagaagactatacccaaattattcctgaaatttgtttaagtgatttaagtaattaaatattattgatatgcaaatgaataagactgatttaatcaaaatggttgctgaaaaggcaaataaaccaacaaaagaagtagcagaaataattgatagttttttcaaagaattatctcaaaatctaagagaaaaagatgtttctataaaagattttggtactttcaaaaagattattcagccagctcggatagctagaaatccggcaactggagaacctgtagaagttccagaaaaggaagttgttaaatttaagccgtccaaaaatatactaaacatgaaatggctatgatagaaataaacatccatattcctatagatggtgtgaacaatatttctataccaatccaattacctgtagttccaagggttggagaaaagatttatctatctgacaaacaaataaataatttgataagtctattagaagaagaatattaccacaatccacaaacagaagaatggaaagaatcaataagacggttcaccaatattgaggaagtagcatataatgctgcaaatggaacgatacacattgaattatcaactatttaaaagaaacaatatgaaaaagtatttatcattagtaatgattggtttaagccttatgttgtctggatgcaataaagacgataacaacgaccctgatactccacctacaggagatacaggaaaagtacgttatgaagctaccgtaagcgacccagaaaatttcaaacttctaatacattatacagtaggagtagatatttcttccgaagctcccgaagaagctgccaaagaaactattgtagaaagtccattcacatttgagcaagaagccaaacaaggaacatatttatggctatctgcctaccctatacctaaagatgaagaaaaccttgaaaatttacagctacctaagacagtcgaagtaaaaatttttattgatgataagctgcataagtctaacagtggtgaaaattatgcaatggttcaacatatattcggacaggaaaattaccagtagaattgataccttttctgcctgcactggagagaaaccgggaaggtatttgataccgtacttttccgggttctgcccggcatggacgataagagaacattattatgataccaaaaaataaaaaccaataccactctcactgcataaaagagtggtattttcatttgaattaataaaatgaaagaccaaaaaagattattacacaagtgcctattagaagacattccagcttttgtaatatgcggaacagatatttgttccgtccaagcaatggaagcatattaccagatagcagtagaaaaaggttgcaatagcaattttttagaagacttgaaattagctatagaagatttcaaggcttttcaatgtgaggaacctgaaaaagttaaaatacccgattaaatcatggaagaaagcaaagaattacaaaaactatatggattcatgcaagcattcatttatataactgtttgcatagagattctactatttgttcattttccctttagtgaacaaattatgcccttattatcaaaaatggcaaaaattcctatctattctaatattctttatagtaaactatttacattctttattataatggttacttgcattggaacacgttcaaaaaaggatttagaattagacccgactaaacaaatcatttttcctttaatctttggattcataatgttctttggaagtatatgctttcttttctttaaagaaaaaggagaaactagtttagaatggtataatatagcttacattatactatcaataattggagcgacattaataaattcagctctagataacatttccaaacgtattaaatcaaactttatgaaagatagatttaatatagagaatgaaagctttgaacaatctaaagacaaggtagaaacagaattctctgtcaatattccgatgaagtttttctacaatagaaagtggcataatgggtggctgaatatatgtaactgttttcgtggaactttcgtaataggaacgcctggaagtggtaaatctttttctgttataaattcttttataagacaacattcagctaaaggatttgcagaagttgtttacgacttcaaatttcctgaacttgccaaaattgcatattataattatcaaaagaacaagcaattaggaaaaataccaagtaatttcaagttcaatgtcattaatttttctgatattgaatatagtagaagaataaacccattgaaacgagaatatatagaaatcctagcagatgcaacagaaacggcagaagcattatatgagagtttacaaaaaggcgacaaaggaagtggaggtaatagcgatttttttaaaacatcagcagtaaacttgttagcagcttctatttatttttggtctagatacgagaatggcaaatattcagatttaccgcatgtactggctttccttaatcaagaatatgacgtactttttaaagtcctcttttccgaacctgaattaaaatcactagtttccccatttgaagctgcatataaatcaggagcagtggaccaattagaaggacagatggcaagtctaaaagtacagttatcaagactggctactaaagaatctttttgggtatttagtggcaatgatttcaatttaaaagtatcagataaaaaagaccctagttatcttatcattgcaaataaccctaaaacacaaagcatgaatagtgctttaaatgcacttatcattaaccgattaactagacttgtcaatacaaaaggtaactaccctacttcaatcatagtagatgaatgtcccacattatatttttatcaacttgcaacactactttctactgcacgtagcaataaggtttcaatttgtttgggattacaggaactaccgcaattagaagaacaatacggcaaagctaccgcaaaaactataacttctattataggtaacactttatccgggcaagctaaagctcctgaaactttagattggctacaaaaactatttggaaaagttaagcaagtaaaagaaggtgttactatcagaagaaacgaaacaacaattaatatgaatgaacaaatggattttgttatcccggcatccaaaatatcttcattacaagctggtacattagtagggcaagttgcattagattttggacaagaagataattttccaacagcgatgtaccattgcaaaaccaatttagatttaaaaaaaattaagaaagaagaagaagcctacaaagaactgccaaaagtatataactttgggacagcagataatagagagaaattactgcaaaaaaactttaagagaatatacgacgaagtagaaacagtaatagaacaatatgtataacattacattaccaattttaggcacaaggttaaagcaaatccgagagcatataggatattcccaagctcaattagcagaacagctgaactgtaaacaaaatgcgatttcaaatcttgaactaggaaaagggggcagcctaaaacttttatttcaagtgctgaatttttattctaactatgtttttatagatttaatatttagtgaaaagttttatctgatttctaatacagaagaagatgaagcgcaaaaagccaattataattctgttataatagaaattataagacaatcagaaaaaaactatgaggatgctatgtcaaacgctaaaaaagagctagaagctaatcttcaaaaagccatcaatttattacagccctaataaaataaaagagagtacaaaatactctcttttattttccaatattactttaaagaatttgtgatacctattcttttggagttctggcactgatgggcgtatatagcatgatgaaatgataccgaattatcgtccctggtacaccctgaagaactcctttttgataccaaatacaaaaagctgctggaagccggacacaaagaattgataccataaaactatagggaaaaagaagaaggacaaaatgccatattatatataaataatatgaatatgtgattaatatccttcactccccgaaacccagaaagagcaacacgagaatcttcttttccctatgtccatttcataaaaatgataccagtataataacaaatacttataatatgaaaagagagcatccaaatacataccttttaacaatacaatcgaaatcaatctatcctatctaattctattatagctactttctctttatctggacttgcttcattttgtataagagttatatgtttttgggtatagcttttaataacccaaggagcaccacctaaatataaagcattgctattaaatatgatatattttccttctattttgtaagtaatatcaatttcatcgtaactttcccaatttactttccccgattgagtatctataaattgcatacctactcccatattgggaactacccaagcatcacaacgacctgtaccacgccatgaggtttgatatagtttttggggagtaagttctcctatttgtacctctggatttttatcatcacaacttgtaaaacttatgtttactaaaaataatgcccaaagcattaataagcaagattgtttaaaataatgtaccatgtattaaaatagattatattaatataaataccagacttcaaaattacaatcctataattgtgtatagatttgctaatgttgctattgaaatctgtttttctactaaattagaagcccatgaactaagaccatatacttccagcaaactctcatctctttcatctgcaaaaaatgaaaaacagagtttggtagttgggtcgtataaatattccatattagttgcctcatgatagtacttacagaaacctttttcattgaagttctccaaaaccatacatagcggagaacgcatttgaggattaatacgctttctagtattataacttatctgaatatcagagctgaaataccttgatatttctgccgatataatttgggcttttttgataaaaacattatcatcttcattttgccttaattccgcatccgtagcattacttttactcaatactatttggtcaccctgtcttgttgttaacacagcagctacatcatataaactttctcccgaagcagatgtctttgtcaatactcttgcaatcgtaatagacggagtataaagtcttgtaacaggaagaagaatttccttagaagtatcatcaaaacgtctttgaaagtttctttccagtacaaaatccgacattggatataatccttcttctattaaatcaatcactgtatgattttttgaatcatttaatgattttctccaagattgcaagtttatatttatgtctttaagtgccattgtagtattcactacacctgtttcatcttgaataccacccaatgtttttacacgtataaatatatcttgtcttttgtaaactgtagaatcaaaagtaccatcctttccattaaatccgaacgacccattaagtgaatcacctttatatacaagtgaagcattaatatttttctctaaggatttagttttctgttcaacattcgtatttgaatccgcattacccatatattgcgcaaaagctcttccacctgtataataaccaacaacaacaaaatctccatatgaatcaatgatagatgatataggagaggtatataaattattaataaaagaccttcttaaaaactgccttgcaaacactttattagaaccattggaacttaacaaggtaaatttgccatgagcaaacaatatattcatttccccataagcttgttcttttgattcattaataaaagttctaaatgtttcggttgtcgttttctttttccctatagaaaaaaatcctagatttaaagaaaatccacttttcacagttttacttattgatgaaaaatgcgtataattattaaaatcataataagcaaacgatgactggtcgttccagttaggataattttcatcaatatatgattcatcatattcttttagagattcaatatcaagtatggaatgcgtaaagttatcaaaatcacttggtatataattccccttaagcaatttataaccataacctagatatttatcagttcccccaatcatctcaccacttcttgtcaactcttcatcaaaagaaggttgtcctgtaataacatctggaagagatggattacgttcttgaagaatcacatcatcacatgaataatcagtttcaaccactgtattttgctgtgcgcataagttcaaatcctctgaacaagctataaacaatggagctataacagataaaattattatatataatattgatttcataatcttttcttattgcagattattattagataaacttttcatatattcttctaaaggaattgttactatttcgtctggttttgcctttgatgtagtatttattattccataccaagaacctttaaatttaacttctctatcattagcctcatttccattacgataagtcatagtaatagtatagtcagcctttacactatatttctttaaataagtcgttactttaattaaagatggctcatcaacttctaccggaatagtcaccgataatgttttaggtatctcatacgttgtggaagtataaggagctctaggcaaaaatattgttgaatcaggcatttccccactactaaaattgccaggggcaataaattgcccggctattattgcaggacgtaaaaacatttgttcttcatttgccattggaattttcaaagctcctttttctgtataacaagaagtatcttttacatctttttttgcataaattgtaatatttgatggtccagcaactgctcctgtctgaccatttgaatacacaacaacagggtctaattccgtcactacagctttaggttcaaatgctatttcttttactttaaatttatcctgaaactctaatagaaactcttgctgtggttgcttattatattttgcataccctacctgcccattactctttacttctatagaataattaaacacactccaaggattattggggtctgccgttcctaaatatgtctgattttcaatattaaaatatcctttatatgttgatggtataaggtcccaacttccagaacttatatcttccgagtcccaaacaaaaacaagtttattgtttgggtcattgttatattgaccacaaaccaatggcttattataagactttgaataaatcaaatatggtattccactactaggtggcaaaatctttaaatagaattttgaagaactataagctgaaagtatcaattcttttctcattccttgagtagaaagataaggctgtccaaccactccacctcctctgactttcaacgcaaaaggaagctctctaacagcatacatatttgatgaataaaattcatctgtctcaggataataagaataagatttcgtttctggcttttttttaaactcatctatattagaaaacagactcacagagtcagcaacagagatagctcttgactggattgaactttctgatgtttccgaaaaatcatataaaagttcagaacttttttcacaagagacaagaccaatagtcattgctcctaccaataattgacttacgccccaaaaagaatagaatttttttttcataaatatagttttaaaattatgtccttagaaacaaatacacaatagagttcacgtagatttactttctgacgcacgcgaatacgccacatatacaaaaggacgaagagaaaacaaatccatgatgccaaaaacttttaggtaaatatataaatagctcttacagcatattacgttaagagctatttatcccaaaaagtcagttatattttacttaatttcccgaaagacttagccaaagacgaactgttcttttagccttattctgttctccttctagaatctttgcatcacctttcttatagcttatttttaattgagaatcagtctgtatagcatcatatagaggaagcaaaaagaaattatcttcatctaaaagtttttccattattaacggaataatatttttacccatcgcttgcatttctttaaactgtggtaatgttgtataagcgagagtacttgaactatatttagtttgtggatttattgaaatttcttcgttccatgaattaaacaaatcgttaaacttagtctttacctcacaattaatatttgcagctttatcaatgacagcttgtttttctgcatcagaaagttcaatatcttcttgtgctatctgttttgcaagttcctttatctccgacatatcagtctttgttctactctcgataaaagaaaccaaaattctaccatacaaagtgccagatagctcactccttttatgggtaatacgcaaataacgcccaagttttgactcccaagtaccgctactatatacaacacttccatgagtcatatctatactacttgttccccaaccatcaacagtagcattgctaccttctgtactagtctgttcataattacaagacgaaccatataaagttttagcatttttatactgttctataaaatcattgtaaaaagattctgggtcaatccatttgttagttatccccatagaataagcaatacaattatatgtacctgttgcttctcctgttacagaaatattatttacatctaaatttgggaaatcctttttaagattatccttttccgcttgtgtaggaacccttctcatagaagcagctctagtagtaagttcgtttggattggcattatcctccacagaaccaatctcttcgttttgctgacaagcaataagactaaaagagaaacctaataaaattaaaatttgttttctcataaaacgatatttttaagttagtaattattcagcaaatgcatttgcatatcgcaaatatacaatacaaattgtatataatataagaattatattgttttttccactgttaatgcttaaaaacataatatatttgctatttttgcaatatacaatctaaattatactaatatggaaaaaacttatcattcattaaaagactttgaactatcctatgggaaaaatgctattgagagagcaaatgatttccagcagtacattgagcaactaaatgatttcggatgtaaaagctattggataacttcacatacaggtatcggttcaacaatggcaattgaaggcttcaacgaacctgttattgcatttatttctaatgattatttaggtatgtcacaaagagaagaaactaaacaagcaggtatagatgctataaaaaaatatggaacaggtgcttgcgctgcacaagtaataggtggttatctcgacatacaccaacagctagagaaagaaatagcttcttttgtaggacaagaagaagctattttattttcttccggatttggagcaaatgccggaatactaagagccttattgggtcaaaatgatattgcattgatagacccttatatccacacaagcgcaatggctggactaaaaggaacaaatataacctcaaatccgcaactaagcccttgaacgtccttattgcgtttacacgtcctctcattactgaatttgcagataatttgaacttgaagcacccacttctgcctacaatatccccttaccccacaatgtgacttgaggcaatacacaatatcattcccataagttgtaggcattatccaaaatcagtctggaaaacatctgcgtaagcattattacaggtatagatgttcagcacataccgccttgatgtcctgatccacttggctggtacagagataaacctgaagacaaacgcttttatgcgacttgttgcattgagcccgaacttctttacgtcaagtctttgaataatggccttgtaaaagttacggataagtgctgtaagaagaaggaacactgtgttctctgccatgaaggatttgggcaatctgtcccacccgaaaccattgttcatatcatcgaagatacgttcctttcctccacgaaggttatagaactcgacaatttctcttacggaagaatcatagtcgttagtcaggatacaacggtatgtgtattctccttcccaaaaatcctgcacaccatccatccgtttctgtctttgaatcacaagtcgatatgccttacctttccacttctcaacaaggatagagttcaattcaaactcaatgccattgatttcctcagttttccagcctttgagagcaaaggtgtcattgtagatcgaactgcagcggttagcacggatatagaaggacttgcagtgtttttctatttcctccacgatttcctcggaacatgatccacaatcagctctgaagcgattgatagtgagcccattctgttcaaatctcgcaaagaacctcttcagcgtgtccttctgatggaaacgaacatttgtgttaccatcgctattctctataccgactatcaaatcgccaataaccgccacgccagggcgataaccaaggaacttcttgtatgtaggctttgcatcatacttctctgtctctatgaactgatggtcgaaatcaacatcatacatctcaccctctttcagttggccagatgcaaatatacaattgagcaataaagtattgagagtgtcagccgtattgaaatcgtaggtcttgcccatatctgatgtgtatgaaatgttttcttgcgtcaactcctttatcgccctgaggatagtatcagagctacaagtgcgaagtgtcggatgaagcgagaggtggttcatcaaatgagtagtgacatcctcaatacatgaaccgctacagaagtagatactcatgagagaacggatgatttcgctgtactgataaccgaacgatctacaccttagaccgagggttgagtcgattacagatgataatgtggagtcaaattgctccatgattgaaaataatcccccaaaaggagtgagtctctcagatttaatttgtatcttcgccatgtctatcgtcggattctcttgttttttttgcaacactaagataagtgaaaattctgacatggcaaaatcctgagcaactttttgttgctcaggtacttaaaaagtttaatttataatagtgttgcggaattaaggatcacttctccacgatttgaattcaagtattcacctgtaagaagttactaatgacaaaaaagaaattgcccgttcgttttacgggtcagcactttactattgataaagtgctaataaaagatgcaataagacaagcaaatataagtaatcaggatacggttttagatattggggcaggcaaggggtttcttactgttcatttattaaaaatcgccaacaatgttgttgctattgaaaacgacacagctttggttgaacatttacgaaaattattttctgatgcccgaaatgttcaagttgtcggttgtgattttaggaattttgcagttccgaaatttcctttcaaagtggtgtcaaatattccttatggcattacttccgatattttcaaaatcctgatgtttgagagtcttggaaatttttcgggaggttccattgtccttcagttagaacctacacaaaagttattttcgaggaagctttacaatccatataccgttttctatcatactttttttgatttgaaacttgtctatgaggtaggtcctgaaagtttctttccaccgccaactgtcaaatcagccctgttaaacattaaaagaaaacagttattttttgattttaagtttaaagccaaatacttagcatttatttcctgtctgttagagaaacctgatttatctgtaaaaacagctttaaagtcgattttcaggaaaagtcaggtcaggtcaatttcggaaaaattcggtttaaaccttaatgctcaaattgtttgtttgtctccaagtcaatgggtaaactgttttttggaaatgctggaagttgtccctgaaaaatttcatccttcgtagttcaaagtcgggtggttgtcaagatgatttttctggtttggtgtcgtcttttaagctgccgcataacgaaaaatggtagccgtagttgccggatttacagcactttcgtatcaatttagcacttcggttcgttaaaagcaccaaagtatcaagttggcacgaaagccggcaattatcggctaccatatgttagtggcatttatcatttcattatattcatttgctttaacgcattttttgttacattaattctcgatgaaataaaatcatcaacattcaatccgtctgtcggaattacatttgttgcaaaaaaataaacattagattttgtttcaacataaccaacaaaccaaccattatatttttcttctatcgaacttaatccagtcttaccgcttaaaatgtaattttcagttcgctcaatttccataatatttttgacaatctttattgtcctatcagaaattggaaattttgaaaaatagaatttccttaaaaagtcgatttgttgtttttgagatatttttgaatttccttcaagccaaaaattgtcaatcgttaaactgtcaaaaatcatatttttatactcaaatttttctaaatattctttcattttaattgttccgattttccttgcaatttcctgatagcaaggaacacaggaaattctaaaagcatctttaaatgataaatctttttcccaaatatccatttttctctgctcgccattccattttaaaatagttgtatcattttcaataatgcctaattcaacagcaattatagaatttggaattttgaatgttgatgcaggtaattttccgtttttagcccaatcaaagtcatttgagtaaaaagtattcttgtcgttatcataaattagaattgaaccatttacttgaaaactatctaaaattttgtcaaaatcagaaatttctgtttcaattatgtttttattcgttgttgtgttacagcaaacaaataaaaatatcattgaaataaaaactacaaataaaatatttttcatttatccttaattccgcaacactattataaattaaactttttaagtacctgagcaacaaaaagttgctcaggattttgccatgtcagaattttcacttatcttagtgttgcaaaaaaaacaagagaatccgacgatagacatggcgaagatacaaattaaatctgagagactcactccttttgggggattattttcaatcatggagcaatttgactccacattatcatctgtaatcgactcaaccctcggtctaaggtgtagatcgttcggttatcagtacagcgaaatcatccgttctctcatgagtatctacttctgtagcggttcatgtattgaggatgtcactactcatttgatgaaccacctctcgcttcatccgacacttcgcacttgtagctctgatactatcctcagggcgataaaggagttgacgcaagaaaacatttcatacacatcagatatgggcaagacctacgatttcaatacggctgacactctcaatactttattgctcaattgtatatttgcatctggccaactgaaagagggtgagatgtatgatgttgatttcgaccatcagttcatagagacagagaagtatgatgcaaagcctacatacaagaagttccttggttatcgccctggcgtggcggttattggcgatttgatagtcggtatagagaatagcgatggtaacacaaatgttcgtttccatcagaaggacacgctgaagaggttctttgcgagatttgaacagaatgggctcactatcaatcgcttcagagctgattgtggatcatgttccgaggaaatcgtggaggaaatagaaaaacactgcaagtccttctatatccgtgctaaccgctgcagttcgatctacaatgacacctttgctctcaaaggctggaaaactgaggaaatcaatggcattgagtttgaattgaactctatccttgttgagaagtggaaaggtaaggcatatcgacttgtgattcaaagacagaaacggatggatggtgtgcaggatttttgggaaggagaatacacataccgttgtatcctgactaacgactatgattcttccgtaagagaaattgtcgagttctataaccttcgtggaggaaaggaacgtatcttcgatgatatgaacaatggtttcgggtgggacagattgcccaaatccttcatggcagagaacacagtgttccttcttcttacagcacttatccgtaacttttacaaggccattattcaaagacttgacgtaaagaagttcgggctcaatgcaacaagtcgcataaaagcgtttgtcttcaggtttatctctgtaccagccaagtggatcaggacatcaaggcggtatgtgctgaacatctatacctgtaataatgcttacgcagatgttttccagactgattttggataatgcctacaacttatgggaatgatattgtgtattgcctcaagtcacattgtggggtaaggggatattgtaggcagaagtgggtgcttcaagttcaaattatctgcaaattcagtaatgagaggacgtgtaaacgcaataaggacgttcaagggcttagttgcggatttgagggtgaatagacagtattacccgacagagcaactatgacaacgtaacgcctttacaaaaaagtcggtacacgaaacccatagactaattgtcttgacctaaaagagattggaattttcaggactgcctatcacttagatagaagtccaaggtctgctgaaatacataattcaaaaattgaaattgcttgactgcaaatttagtaactttgcttgacaaattaacgagaaagaagagaaaatgaaaaccgaccgcataacatcacctatacgcaagcaggggtttcgtgcttcgtaggacagttaagtggtaaatttaaagttcagttcttcgtaggaagttcagtggttaaaatccctgcctgcgtatagctgagaaccgttgtacgacatagtaaaaccgaaccaaacaaaatgaaagtcagagaagaaaagttaagaacaattatagaatggtcggagaaaaacgaagatgtaagagttcttcttctgacaagttcacttgtaaatcctttagcacttgttgacgaatttagtgatttagacattgaatttgtttttgaggataatacaaattacatttcagacaaaagctggacgcttaaattcggaaatccaattgctatgattgaagaagacgaaagttgttttaaccataaacacgcaatgaaaatgctactttatgaagacggtgtgaaagtagattttaaactttacagcaaatcaaaatttataaaggaaacgcaagagaaagaattaccagaagattgggatattggttataaaattttaattgataaagatggtattacaaagcaaatgctgaaaccaacttatcaaatttccattatcaaaaaaccgtctgaaaaagagtttcaaaatctaataaacgatttttggtgggacacaacttacgtggcaaagtgtcttgtgagagatgaaatattctatgcgaaatttatgtcggaaaccgttattcgcacagaatatttaattcctttaattgaatggcacattgcaagtgaacacaattggaacataacgaccaataaatatggacggcttttcaaaaagtatcttaaccaggaaatgtgggctaaaacagaacaaacattttcagggagcgatataaaggaaaattggactgctctattttcaatgactgatttagtttcagaaataggaactgaattgtcaaaaaaattagagtacaaatacccggataaattagaaaatgacatacgaaaatatttagctggactaaaacccaaaacataactacgtcgtacaacatcgtattggcaataggcgggctgaacggcttcgtatcaacggaagtgcaaaattcaacttctgttcttcgattaaagttcagtgctaaaaatcccgcccatcgccaatacgcggcacgttatgtgaaagaataaaacggcacctccaaaaagaaagtgccgtttcgaaattaaatttataaattctcaatccactacttctgaaacagttgatttttctattagaaaaattccgtcaaaagcttcttctatttcagtttttaggcacatcgaatcaaatcgaatcttattacaattttttaattccgtacttctgttcattagtaaacagcattcttttcctccaaattcttgcataataaattcaacagaatccgactctggaaaatcaagtggaaatttatcaaccctaaagccaaattgataatcattatcaggatacaatgccgcagtttctccacgtagattagttattgcaaatgctttatatttttctccaaaagtcatcgaaagtctttgccccattggataacaactaataaatccatcaaaatctaccggagttttttgaatgtgagcattgtgggcaaccaaaataatctttttaccaagtgaatttttcaaaaaccaatcaatgctttctgccatatactggtcttttgctcccatatctccttcaattcccctttcagtaatgaaactttccatagcatcagcattataattcatataaatcaagcctttaacttgatgaactatcgattgaaattctaaactttctaattttggttgaagagtaatcaaacgaatgtaaacttttaatagcaatgcttttaattcattatgttcagcttcatcaaaaagcgataaatttaacgcaagctgagaagtcgaatagaaatcaaatttctcagcaagatttaaaatcttctgtaagacatcagaagaaacgattgaaagtctttgcaaataatcagatacaatacgaaagtttggaaaataagaacctccatttttaggaatatccacacctaaaaaggtaatttgattattattgtcttgattataccgacgaagccatagcaaagtatctttaaactcatttggataataaaagtgtgacagtaacttatccaaatcgtcgaatggaatttgtgattttatccacttatcaacttctaatccttcagaaaaaccaaactcaaatgccaaggtgtcaaaatcacattcagttactaaaaactcaataacttgatgcctgaatgtaaaaaactcttttatgaaatgtgcgttttcgcctaaaccaacaattgtagaagaatcaaaatattctcgaaatcgaaaaagactttgttttatggatgtattattttccgaattaaacggaaaagttaagggttttatatttttcattattaccttattttaaattaaaaattaacgtaccaaatagcaaccgtctcaaaaagacgatttaataatttactttaatttttaattaccaaggcttgctgaaatacataaaatgtgaattatttgaatacaaagatactaaaaattccttcacataacatcgcattggcaaaatggcaggttaagtgctaaattgaaagtttctgcattttattccgccgaatgtgttccacattcgctttttatttgtaagttagctctgtggaaacacatcggctacgttctcgctaaattgaactttttgtccaatttatccgccacttcgccaatgcgtttcccgttatgtgccatttttgaatgacaatgcgaatagatacagacaaacaaatgaatttacttagtgataagaacgttgcaataattggtggtggacccgttggactgactatggcaaaattattacagcaaaacggcatagacgtttcagtttacgaaagagacaacgaccgagaggcaagaatttttggtggaacccttgacctacacaaaggttcaggtcaggaagcaatgaaaaaagcgggattgttacaaacttattatgacttagccttaccaatgggtgtaaatattgctgatgaaaaaggcaatattttatccacaaaaaatgtaaagcccgaaaatcgatttgacaatcctgaaataaacagaaatgacttaagggctatcttgttgaatagtttagaaaacgacacggttatttgggatagaaaacttgttatgcttgaacctggtaagaagaagtggacactaacttttgagaataaaccgagtgaaacagcagatttggttattcttgccaatggcgggatgtccaaggtaagaaaatttgttaccgacacggaagttgaagaaacaggtactttcaatatacaagccgatattcatcaaccagagataaactgtcctggattttttcagctatgcaatggaaaccggctaatggcatctcaccaaggtaatttattatttgctaaccccaataataatggtgcattgcattttggaataagttttaaaacacctgatgaatggaaaaaccaaacgcaggtagattttcaaaacagaaatagtgtcgttgattttcttctgaaagaattttccgattgggacgaacgctacaaagaattgattcatacgacgttgtcatttgtaggattggctacacggatatttcctttagaaaagccttggaaaagcaagcgcccattacccataacaatgattggggatgccgcacatttgatgccgccttttgcagggcagggagtaaatagtgggttggtggatgccttgatattgtctgataatctagccgatggaaaatttaatagcattgaagaggctgttaaaaattatgaacagcaaatgtttatctatggcaaagaagcacaagaagaatcaactcaaaacgaaattgaaatgtttaaacccgactttacgtttcagcaattgttaaatgtataaaatggaataaaacggcacataacaaacaaattggcaatagagccggtgaagtacttctattgaacttttgtgcaatgttgaagattagtaattctattcaacatttgtgctaaaagtcggctccatcgccaatttgccaaacgttatatgccatattacaccaaaactcgtctgaattatacaaaatgaactatgtttaacttttttaaacctaaaccaaaaaatcaaattgaaatggaagtttcgggaataaatcctgaaacaaacaatgaatttctattctataattttatcgaaaatacaccaaactatattcttgaaccttggctaaaaaaagcaaaacaagttggttataaagtaaaacctcaatacgaacaagcgattttgcaaaaattgaaattcaatcaatttaaaaatcctcatacattccctgagtactttgaaaataaatttgattttattgctattgactttgagacagcaaataacagtagattaagtgcttgtgcaatcggattatgcttcgtgaaaaatgacacaatagtttattcgacaaaacactatataaatccaccaaaatcagaaaagtttttaaaaactcatacttcaatacacggaatttcatatgaagatgtagaattttcccttaattttcaagaattatgggaagacgaactttctaaatatctttcatctaatttattaatttttcataatgcgagtatggacttgagtgttttgaaaaatctatctgattctccgcaaacacacctaatatttttagtatattagcgctcaaaaagcagggattatgaacatattcagttttacggctcatttcggttcggaggaagattgtcgtttgcatttcaaggagcagcgtgataaggaaggggttgtctgcaagcgatgcgggggcacttcccattattggttacagggtaaatggagttatgaatgcaaaggttgccgtttccgcacctcgttgcgcagcggtacgatcatggagagctccaagctgccgtttctggtgtggtacaaaacgatgttcctgatgagttgcacaaaaaagggattctccaccaacgaactccagaagcaattaggattgaagcgttacgaaccggtatgggcgatggtacacaaactccgcagggcgatgggcaaccgggatgcaaggtatacactggaagggatgatagaactggatgagggttacttttcggtggccagtaaggaaatcgagcgaggcaagggtacacgtggccggggagccgagggaaagcagaacgttgcggtgatggccgaaagcaccccgttggaagatatcgaaacgggcaaaaaggagaagcatgtgcgttatttcaaggccagggtactggatagccatcaaagtgaaggaatcaacggcgtggtcagggactgcatggaggatgatgccatcgtattttcggacaaaagcacttcttacgttgacatctccgatctggtggaattgcacgtcaccgagaaatcagacgccaaaaccaccaaggaaacactcaaatgggtgcatatcgcaatcagtaatgcaaaacggacattgctgggcaactaccataaaatcaaaaggaaatacttacagttgtatctcaacgagtttatttacaaattaaacagacggtattttggagacaaactctttgacagactagtaattgcgaatataacaggtgcataaacggataatcagaatctttaaacatcctaattaactacctgcggattttaggtataaaacgaattgggcataacgacctagaatatttggagaaggtactaaaagaagtcaaagggcaatatcaaactaaacttgtaataatagatggtgtatattcccaggatggggatttgtctttacttccggaaattattactctttgcaagacttatgaaaccatgctgatgttagatgatgcacatggaataggagtaatgggagccaatggcagaggaacagctgaatactataactgtttaggtcaaattgatattattactggcacattcagcaagtcatttggttgcgtagggggatttgcagcagcttcgaagaagataatacaatacttgaaattttatgcggacagcaatgtgttttcagcagcccctaccccacaagtcacagcatccatactaaaagctttagagattataaaaaaagaaccacaaataagaaccaaactttgggaaaatacgaactatcttagaaaacggttgaaagaagaagggttcgacataggaaaatctgtttcccctatttttcctattatgataagagataataaaaaggtttacgaaattgctaaaatgttgcaagaaaaaggtatctttacaattggaattgtatatccggctgtaagaaccaaagaagcaagattaagggtcagcgttcttgccacgcataaacttgaacaattagaatctttagtcaatactcttaatgatataaataagaacataaaaataaaataataatgaaagaaaggagaaagcgaagaagtgccaaagacataaaggaaagcattattaatgcggcaacccatttaattgaaactgaaggattttctaatctaacagttacaggtattatgcgacaagctgaaattgagcctgtacaattctataacagatatgatgatttgaataagttcattgacgagtatgtaaaaaaatacgactattggtttagcgatattgtaaaatcacaaaaacaatctagtaacgataaagcactatatatgaacattcttgtaggtttatttcaatctttatcagaaaataaaatcatgcaagaacttctaaaatgggaactagctaataacaatgaaactagtcaacgtaccgctcaactacgggaattgcacacgttacctttatgccaaaaattctcaaacatattctccaatacagatattgacattgtaactatatctgcactaataataggaggaatatattatcttattttgcatgataaactttcaactttcagtgaaatagacttaaaaaaagaatctgacaaacaaaaagttattaaggctataagcaaattgtcagacattttatttacgtttataccttcttctattactaaagaaaatattgatattataataaaaatgagagaagataatattcctgtagaaaaaatagcatattatacaggaatccctaaagaaattattgtttctatctaaaatatccgtccaatgaggaaaaacccattggacgggtctatagcctaaccaaaaatcttttgtttcacaaaacgaccctttttctgtactaaagaaaacggttctttttttgcttaatcaaagaacttatgtcgctacggtgtttagttaaccaatcttccaaaataaacgaaactaaagatgaaataggtattttggctttagctttgagcaacccaaacacctcttttacatctgtatcaacatatagaacttccttgcaattataattttttcctttaatgtactctaataagtccgtcaaatccatttcactagagccattaaaattaaaaacttccgaagaagttgtttccatttctacatgaagtggttctttctcctcttcaacttcatatttagcttcttgaataggagcttcatttatactactcccatgcaattcttcacctcttatcattttagctatttccagaacactagaaataccttcattttgctttttccttaatttatcagccatgtgcaaatatatacaataaatgaataactttataacaaatatctattaaaagaatattttattttattgctccttcttgaatgatataatcataagcattcttcaccttatcaatacactcattactaattgctaatgtatttatacgttccatagcaacagaagctggtatttcatctgtaacaaaaccaacttgcttaagaatatcaactacctgttcttttgtttcatatcttaccgcagttctcatattgttaggtaaaaagaatattttagcttttacatttaaatactgtaacacttggataaaaaaacctgtactatccattgtaaatttatcgtatttaaatgggcatattattatatccgcagctttaagaatagttcccagagcatcatcatcaatcttaccaggcaaatctattaatagatttccttgctcaaccttagtaaaatcactaataattttagcaacattagatatatcggtttgtataacctcatatttaggttcattatcataggtcgcaatatcttcttttcttctatccgataatgaacgctgaaaatctaaatccaatactagaacttcttttcctttttctactagatagttggcaaattgtatgcaattagtcgttttaccacaaccgcctttctgattcccaaataatattatcatatcttacttatatttattaattttgttgctgtcctcttttctttttcctattaggagatttatcttgctgtacatttatatgctggctaagaatatcacaaatagcatcaatcagattaaatccccttgccagttctgaatcttgttcaacatttattctttccatcttatcaagagtaactagagtaatcctatctttactatagccatcttttataatattgattcctaaatcatcagtacttacgattactttattctttttatctattagataaactaaattatcatcttcaacaaaaagaattcctttttctcttaatgtagaatgtaaatctgaactatgagccaaataactatttatcatatcagtatagacagtattttttttatccatatgctcttgaatcaaaatatcatcttttttcacatgataaattctacttaacaactcggcttctttaagtgtagcaacattaaatttatttgcttcatacactctgctattatatctaagttctttcaacagttttttatcaagaaccaataaagccttatcatcaccatttataaatattgtgccattcattgaaaacctataaccgtaatctaacattaatttcttgaaactatccattgtatattttgttccatctttcaaaagaagattaattatactattacagtgttcaacttttgcttgtttattaggctctactaaaagttccttcaaatccataacttccccacctttcaaaactctcttatttctataatcaattaatgtatatccataaggtttagtatgtccttttcctgtatgaaagactaaatttataccaaacttatctttcatcaaagtttgaagttctgtataggaaagtccttgcttatatttaaataaaagagctgttatctgttttcttctttcttcatcaggtgtatattgtttagctttatcttttatctgctctaattgaattgaagcgtgcttttcaccacccttatacaaaattaataatccatccttttctcttaatttccatcctgattgttcaagtaacaacttatattgctgcactgtagaaaaagaaaactccatgtattttgaaatatcatctttagccttcaaagctaaatcaacattcattatttgatttatgactttctgtgagcgcacagcttccatattatcttttaccttctgtccgttcttctgtactcgtgtagaaacaatatgtacatgattattttctgtatcagaatgaaaatatatcatataaggattatttccataacccattttatttatatattgcaaagctacatttttcaaatcctctgccgaatattcacgccccttacatgaaatcactgcatgaaattgttttgccttgaccgctggattagtcctacagacagattccatataagctatataatccgacttcttcaaattatctggattcatagcaaaattttctgcaacaagaagttcactcttgccttcctcattctttcgctcattataatcaataccagcgaaagaagttgccgcttttaaaactactactaccatatttataacttcacaccgcaaatatacaaacaaatattcaataaaagaatatttcaatataatttattcatacaataaatatacaaatattatatattcatatattatttatatatataatattttcccctaaagtttttggtatcataataatgttttctcttcgtccatgccgggcagaacccggaaaagtacggtatcaaataccttcccggtttctctccagtgcaggcagaaaaggtatcaattagatgcaatccttttgccgatgggcggtagttcctgaatggtgtcggtgtcttttcttttatgatgcagccgttttcctgtattcaggtatagagagaaacgacacaaggaactttagggaaaagaaatagtaacgctgtctttatcactaaaattatatatataaatattatatatacatatattatttgattgacatcaacttacgccaagtaacattcaatttatcttgcataattacatagtctgccattttcttttctacctcattaagaacctcttgattaacttcttccttatgaatatttacatacctagccaactgatttatattatttcctatacgtttcatttccaaacaaatttcatccatcgaacgaataaattctttagggtcaataagaccaactcctttcctaaagactctctgtctaaaataatctgacatacatttgctagatttagaagctttagttagttcttcatattctaaattcgttaagcgaactttcactattctatctcttttatttgctttcatactatgatactaaataatatatgcccccaagttgcgagggggctaaactcctgatttatcaggcaagatttggtttttgtgtccacaaaaacacatcttgctattaatttctacaaacgcaaatatataaattactaaacaccctcccaaacaaaagggaaaaaaatacaattagataagtttttttggtatcataataatgttctcttatcgtccatgccgggcagaacccggaaaagtacggtatcaaataccttcccggtttctctccagtgcaggcagaaaaggtatcaattagatgcaatccttttaccgatgggcggtagttcctgaatggtgtcggtgtcttttcttttatgatgcagccgttttcctgtattcaagtatagagagaaacgacacaaggaactttagggaaaagaagatttttcgtgtggctctttctggaactctggaagtgaagcgtgttaatcacatattatatattatttgtttatatattatatattcacatattatttatatatataatattgtattttgttcctgttctttttccctaatgttttatggtatcaattttttgcgtccggcttccggctgctttttgtatttggtatcaaaaggtcgttctacagggtgtgccaggaatgataattcggtatcaatttctttccctacagtatatcaaaaaagcatagggacaaaaacccaactttttaaaatatgttttttttagatagggacaaaaacccaacttttgattgattatttgtatcatatagtgtctttttttgttaatagatgttcttttccctaaagtttgtgttaagattatgagaaaagttccttttttatgggtttatgtaataagaaaagttccttttttgtgtgttggtatgattatcaggttttttttatcagctagtgatggtagtacccttaaaaatgaaagggtaactatctgaaaaacaacagataatggtaaaaaatcagggacaaaaacccaacttcttagggacaaaaacccaacttcttagggacaaaaacccaacttcttagggacaaaaacccaacttttagacccctcctagggacaaaaacccaacttttattcatcttctttttcttctccaatcattccggggagtatttctacttcttttaataatacggataaacaatattctgctttatttgaaattttattccagttatctctaacatattcgcctagataaagcatcttagttactactgctttatagttgcttaatgtaatctgtggaataaactgctgcaaatgctcgtccttcattgcaaagtgcaaagaacaaaaattcgttatcatcttcttttgtccttttaatagttcttcttccttctttgataatgcagacttaataactttgaaattaagtttataaggctgtgtatcgcctgaattacgataaacttctgccatttcaaaccagcaatcagcctgttcaaacaaatcatcgtaaacagggcgtattacacgtttatacaaatctttaaattcggggtatttatcttctaattttaagaatttccgaaatctatccacatagatagaaaaaccacctttttctttccatgagctaatcagcatatacattcttattgtatatctactttgcgctcttaaagctatctcttttatatagcgtgtaaaacctctatcaacattaatgaaaactttagcaacctctctatccatttctaaagaaaaacctcttgaataaggagttttgggtatatttgccttagtgaataaaccagtaatagaccaactatcctcacctgttattgggtctttaacatcaagctctacaggaatactgattaatttacgaaccatgctttttacttccttgtattggtctggattaacgcccaaatcccgatatgcgatatctactcttatacggtctgaatattcttgaaataaagataattgctcgcatggaatagatgtaccatatttatctagatgctgaatacttaattctatgacatcctgtaatttctctataacagcaattaagattctaatctgtactgtcttaaaatcaccagccattaatgtaactacattaggttgtttcagccatgtgggattttctgggagtttcacaggaagatttgtacgaggatgccctttcctaattctaacaatctcaccgtctatttcttctttttcttctttcaccgcacgttttcgggcttttatttctctatttaccatcgcttattattttgactgattaatactccaaaaaaaagtagaataaagaacacaaacataaacttggctatataaaatagccctatgaaaatcattctaaaaatagcaatgataatttctaatagatttcttattatgttcctccagtccattttctttgttttataattcctgtcgccaaagctccggctgcactattgtataaccagcactttgcaaatatactcttttaaattcatcgggcaacgttccttcaaggaattgctttttatgccttgatgcagttcggcggtcatatggactatttttagaccaacctcttttaagaattagttccttaaagcattcatctaatgtttttgctttatctatcataatcttttcgtaaagaaattatagggtttttcatccctttatacgtttcacaaggatttcctaacagttcgcacataacaaaatgtacaatttttccttcatccaatgataaattcgatttatttgctaattctacaactaatgtatattgataactatagttctcaacaacaatttctttttcattggaaacttcattgtaaatctttctatacttatgccataaagacgtattaaaaagctctaccgtaagaaaattgtttacctgctctgttgtatagtcttctggcaaacgtttccctgtaagtctataaacagcctccatttttgctttttttcctacaaacttttttttcccaatcatctgacaagaaggaagttcatccctagatataaaaggcttcaaatctgacaccctacgatataccttatattcaataaacattctatctatattttgattatatgacatctattccctttcacactattcgaaaaattatggtcatttatcccaatcataattatcgtaatctatttcctttcctgtagcatggcattcagccacataatcagcccatttttttcgcttcgtcacatcaaaaggcatacgtagaaactcatccttccaaggctgtataaagtaaccaaaatcgtgtttgttcgttacatactgaacagcatctctaatggcgttatactcatatccttctttcaacaatggttcgtcacccagtttagagtatatgtttgccacttcccgaagcatctttgcaaattctttgtatgtggcaaaattcttttcttttttatccataatcattcttttttgttttgagtattaatttttttcgatgaaagtattggttgtattcaacaccccggctgaatctcgacttttgccatctcttatgaagattccttcttctttcaaccgttcataatcaaattcattcatcatgataatgacaatattttcatttgtatatagcttacacttcataaattgagtaccttctatttttccaattacgtctatttggattgttctttcattcataattcgtttatttatatatcgatttgaggattattcttgtttttttacttcatatcccttttctctgagatacgctgctatatactcatcatctccgacatcattaaggacatcgaaaagataaccttttacataactggctactgcaaccgcatttgcatactcgatgttctgcgaaatgaatctcactttctctgttcttcctaagcctctgaaggcttcttcaattttgctcatatttatactgttttacgctaattctgtttcaataaacttcatcatctgattgtgaaaagaaccactccttttttgcgcagccttacaatcatcaatggaaagattcgattccttaattatccctattgcgattgctggcatatctctgactactacaatatgctgaacagcaaaccaaataccatcaataaattcattattcatatcttcattttattggttaaaactcatattcactttcattgaaattttcgattgaataaattaaaccaccgaagtcacctgctgagaagcctccagtaatattacttcgatgtgttcccttatacttaccaaaggttaatgttctttcttgattcattactattctgttatgcgttatttggtatgataatcccattttatcttgacttatatatctggaaaagagacctgtgaactaaagactactctttcttttccttacgcctcgatttgagaaattctttagccgcttctttgtcctcatgtacttcatctgatacataatatattatagcctttgaattgtgaggattgtttttccactttcttcctattgcatccggatttacaacatatccttcttttgcccattgcagggctgttaggctcttttggttcattctcttataccaaagaaccttacgatgcatttttgtccggggagtaattactccgtctgcacataccagtccttcacagttgtaaccggggctttccagaaattcaatttctttttgaatttcttttatgctcattttctcgatgcgttccatgtattgtgcaatcgtttcatctgtcatatccgctgccatatttcatgaatttatgtattaaaataaggctattaactagtttaatagcccatttttgatttcaaatactatcaaacgtatttatccaattctttttctagcttttccctatcaatctctggaaatagttcaagaacaagacttagcgaatcgcaataattgtttgcatagttttctgtatccatcaatcgtaacaccattgaacaaaaaatactcttttcctgcttaaaagtacgatttaacacagaactagataatctgaaaattttcttctctactccaatcataaattaatcctttcacatttctaataattgactatcaatctgtagttttcttcaatgcttcaaaagaagacaagtaatcatcaacagctttatttaacgctgcatatttatctttccacgtccttatttgccgttgtgtttcaatatacctatcattcaaagttgcataattctgaatagcaaatctaatagctttagcatctgttttttcaccagataatttttttagattttctaactctgcgcaggctgcatcgtctaagcgtaatgtaaactcttttttcataaaaaaatgattaatgaattaatactgaaaaatagcactaacagttggctacgaaatggatttaagaagcaatgtttcatgattttgtttgctgttctttatactggcagccaaaccagctttaaaggtttgtttatctctttattttcaatactcaaagatagtgattttctataaatgtcgcaaataataggacaattatttttgttaaaaatggttttaggtttatagactgccgaggttttatttttccctaaagtttttggtatcataataatgttctcttatcgtccatgccgggcagaacccggaaaagtacggtatcaaataccttcccggtttctctccagtgcaggcagaaaaggtatcaattagatgcaatccttttaccgatgggcggtagttcctgaatggtgtcggtgtcttttcttttatgatgcagccgttttcctgtattcaagtatagagagaaacgacacaaggaactttagggaaaagaagatttttcgtgtggctctttctggaactctggaagtgaagcgtgttaatcacatattatatattatttgtttatatattatatattcacatattatttatatatataatattgtattttgttcctgttctttttccctaatgttttatggtatcaattttttgcgtccggcttccggctgctttttgtatttggtatcaaaaggtcgttctgcagggtgtgccaggaatgataattcggtatcatttcatcatgccatgtttacccatcagtgccggaactccgaaaagtacggtatcaatttctttccctatagttcttattgggttagacaacaagacgcattaaaatgtattctcaaagtgagaatgtattttaatttgcgtcatgtttccgcttctgcaatgcttactaaagtggagttacctaaaaggtagtggaactttactaaggattgcagaagggataaagaaacataccttagaagggtgggtgggtttaccgatagcaaaactattggagcgtaacaaagtgaagcgattaagcctttttggttcttttttggcgtttgaaaaaagaactccccccaatgaggggggaaggaacctttaagcaacctttgtatttttctcttcttcaacttcttccacatctagccttatatttagatgctgggctatgaatttactacctttaatagcatctgccaatacagtaaataaaaatttaggttcttcttttattgctttgcaccatgattttaaataagccgcattttcttctctgacggttacagaaatacccaaatatacaccagacaaagccgatattaattctgctacaagttcttcacgcccataattgaatttatcattttcataaaatccttttcgatttagtctatttttaacacctgtactatgtcccatttcatgtaattctgtaccataaaaactttctccgtccttaaattggctctttaaaggtaaagtaatgctatcatttgatattgaataaaacgcactatcactagaaaccgtttgaataggacatacccaattttgattcttattcatttcatcaagtattggatttacatacatttctttctcttcttgtggctgttcctctcctgaaaatttagcctttaatatatcccatctattgggatatttttccgcaaagtttgtttggtctaaattaaaaacttggaaatattttgtataagctgctaaacggtattctttttgttcttcttctgataatttgttatattcatcatatgaaattttttcatttgtctgacgatgataagcacaaaataatgtataataaacaggaaaagcaacagcaccttttagaacattaataccttcgtttcgtgcttgattgaatgtcaaaaaaacaggagtttgataattatatttttcacacaaaaaataaagtaaaaaagcgtttccaccactataagtacgacctgttaaattttgtggtaaaaagttctgtttagagttgactttagagaaccaaggtttttgccaattcatagacaagctttcaattttttcaaccataaggtttacaaacttctctgcatttttatcaaaagtagatttcataattttgtttgctgttctttatactggcagccaaaccagctttaaaagtttatttatctctttattttcaatactcaaagatagtaattttctataaatgtcgcaaataata

SEQ ID NO: 254 - DNA, 42378 bp, Bacteroides thetaiotaomicron
  source 1..42378: mol_type = genomic DNA
aggaattacccgtcaccaatacaacagctttcaggagttggaggtcacggtcaatcccgaaggctatacccgtaagactgcctacaacgagttcggccagccggtccggattacggacgagaacggggaggacaccttcctggactacgacggcaatcgcaacctcgtctcgctctacactccgggtggaaaaaggctttcatgggactatgacggacaggatcgggtcgtcagccggaccacaccgggcggagagactgtgaaatatgcctacgagggaggcgtgctgcgcaccataacggacgggcagggacgggtttacacgctcacgttcaacgacaggtacgatctggaactgatgcagttccccaacggactgttccgccggtgggagtacgacggcaggggaaggcttgtacaggcggtggatgtgaaaggcaatgttacccgttatgcctacgaccgtgcggacaacctgatacggctggaagagccggacggcaacgtgcaccggtttgagtacgatgccatggggaacatggtacatgccagcgacaacatccgcgaggtcaggttcacctatggggcactgggggtactgaaaagccgcgagcaggaacggcaccacatcaccttcggctacaacagcgagttgcagctccggcgcatcggcaacgaggcgggcgacaactatttcttcgagctggacgggctgggacaggtcgttgcggaaaccggcttcgacggtctgcggcgtgagtacgagcgcgacggggcgggtcgtgtcacccgtgtgaaccgtcccggaggaaaatggacggaataccagtatgatggactggacaatatcctgaaggaggaacagtatgacggggaagtctccctctacacgtatgacaaggacggcatgctcgtcaaggcgaagaacagcgagaacctgctggagttcacccgtgacaggaagacgggactggttacagaggaaaggcagggagaatacactgtcagccgcacctatgacagcgaaggcaactgcacccgcatcaccagcagtctgggagcggacatccgccatacctatgaccgggaaggcaacctgcagaccatgcaggcaggtgaaagctggcaggcatcctgggtacgtgacaataccgggctggaggtgcagcgaagtttctccggcggtgtgactgtcaagacggaacgcgactgtttcggcagggagatacgcaagtcggtacggtcaggcggcatagagaaaggggcttaccgctaccaatggggaatcgccaaccgcctgctctccaaggaaaacgagctgacgggaacggtcattcgctacgactatgaccgtttcgacttccttatccggcaggaaaccacccaaggttcggaaacggatgtgatttaccgtgtgccggacttcgtgggtaacctctttgagacaccggataagaaagaccgcaaatacggtgccgggggaaaacttttggaagacccggattgtttctatcactacgatgatgaggggaacctcattttcagagagttcaagcatttgcaggaaacgggtgtaaggttcgaccgcaaacgtatggagaaggaacggggtatccattttctggcaacgggaacgggatggctttacgaatgggcttccaacggcatgctgaagaaggtcatacgtccggacggaaggccggtggaattccggtatgatgcgttggggcgccgcacggcaaagcaatacttcgggaaggtcacacgttggatatgggatggaaacgtgcctatacatgaatggagatacaaaactacagaaatacaaccagatgaaaaaggagaatcctttcagaaagagccgattgaaaacattaccacttgggtatttgaagaaggaacttttgttcctacagctaagatacaagaaggtaaacaatattccattgtgtccgactacttgggtacccccatccaaatgtacgacgaacaaggaaacaagacatgggactgtacactggatatctatggaaaagtgcttgccattgataagggaacagaatttgattgtcctttccgctatcaagggcagtatgtggataaagaaactaaattatgctacaaccgctttaggtactacgaaccagaaattggtaattatataagtcaagaccctattggactaagtgcaggtgaaagattttatagctatgtcaaaaatgtcaatctttgtattgatatttttggacttgtagccaaagaatttgacatcgatacttatggcaatattagcagtagggcgaatattggtgacaatttaacagcacacgaactccttcaacacgcatggcttgaacagaacaataaacttcccacaagtaaaaatagaggagttgatttaatttctaaagaaaacccttctattgcattaagagaaaagggtatacacaatagaattaccgctcttcaaaatagatatgggatgaaaggtaaaaacttgaaaggacaatctgcactagaaaatataaacaaaaatgcagctttaacacgtagaggaataatggaagggttaatagctgatggcatggatagaaaaactgcgaaagaaaaagcaaccgcattagtcgagaaactcagacaggatgcaatagcacatgctaaagcaaataatttaataacatgtaaatcataaaatagttatgaacataaaaaagatattaaagactagagaagacgctttatattatgatatatgtgaatataaagaaaactgtaatagttgggttgggggtaatgctcctaaaatattagataatatttctttccctaatatggaaaaatattatttctacttaaccctgcaaagcccattaaataaagaaagacaatactctatttttactccagattttgatacttccttagaatacaattcatatcctaattgcaaagtattactaattgaacatgaaataagcgaacagagtaattgtactaaatttaaacatcccgaaattgatgatatttattccttatatgaaataggagaagacagagatgggccagaaaaaaataatgttatcaaatttggaggaaaagctataccaatacaatggggattggataatgatggaaaagtaacaaaagatggatatgatttcatttttcaaatcaacgaaattggaatgagaggcatctcagaatttatgagtggaagtatatatgtatatggtaaaatagaaaatgaaaatattgaaaatctttttgttgcatattgggagtattcttaattttttagtacaatagcaggtagtatcaaaacaaatgtattacatattaattattggaacactacctttattgttaagttacaagacccgtcccggcggattataaatccgccggttataagtattaggatttgtaattcttgaatttccgactgaaagtatatggagataagcaagatgccaatcttataaatttgcacagctttctatttttataaaaataaggccaaggggctataaacattatccaacatcgcttagctcatggtccaaatcaaacctcaacacataaaaaacaccattctccacatagccgaaacacctgttccgctgagtgattctgaactttttaatgcctttcttccataggtcatccgaaaaatagcgcttgcttttcttgttcttgttatacggtttataatccaatccattatctgtagcaatggcactccagtccaactcctcaaatttatggaatgaatcaataaattcgttctgattctcgccgtcaataagggaaaaacccagcgtgtcatcaataaggctgaaatcaagcttgcctccactgaaacgaatggtaatatacttttcgagagatagttcacccctttcaaacaagatagagtacaattgcttctctttccagatattaccaacctcgattggttcttcatctttggttacggcaaccagatgcttctcatacctggatctaataaatgatagaagacaaaccgagcgggctgctgcttcggcaactgaactgccggatacatcggtttcacctactgaatattgggcattggaatcctgttggggagcttcatcccaaaacggattacagatggcacgtgccaatgtacttttatacagcctggcttcatcgatgatacgggtttccggtgctgtcagcaaatcgtgtaaagtcttgtcgggagtggcttgcgcagcaaaaaaacttccttgtttgaacagatatcccactccatgtgaaagggcatcctgcaatgccttgtgaaacggaggcattccgtttttccagaaatcccggctgtccaaaaactgtccgttcaatgacaattcattgataatgataccgtccatagagtcttatagctttaaaatggcatccaaatcaatatcaaactgctcaaacatgccgggaatataggattggattcctccctgtggggtaaattccacaggttcggcatgggtcaatccattcccgtcttgtctgaagttgtacacggcaacgtcagacaaggccaacttttcctgactgatcaggcgccggataccgttaaacaggtggtcgctatggctctctatgatgatttgcacaccggctttcgctatctttgccatgaaatcaatcaggtcggcttgtgccttggggtgcagatggatttctggattctccgtaatcaccatgccgcctttcggggtcgcgaaacaagctatgatgacttccgtcataaagcttactccggtaccgacatggtaagggagaagctgtttgccgctgcgcgtttcatattttacgtaatgattgcttcctactgtttccaccaccagccggtaaccggtcagcctgtccagttgataattcacctgaccttccagggtttgagtgccgggagccaggatcaatgcggcatccagcgtatccagacggtgcttggcgtaatagtctatcacaaattccccgttacgccccagcttgttttccgaatcgggattaacgggatgcatatatgccccaccggggcgtgtggcaggcaggtacagcaggttctcgcttccgagaactcccagcaggttcggagatgcgtcagccgattgttccacaaaagtggtttggaatgagtcatcgcccggagtaaaacaaagccgggtcggatcttctccatgatacgaaatacagatttcgtatgacttggcattggtcacaaagttccttacatcattgaaattcgacgcttctgttctccggttcttcagaccgtgtttgcctttttgctccgtcacgttatccgaagcaatcagcaaggcttgcagggcggtagattttcccgatgaattcggacctgcgaacaggttcagaggttttaattccaacgaacattccaccaggcatttataattgttgacagtcagattgtttagcataaattcagttcatgaataagtcggttgataatttcataacgcttataggtctgctttccgctatccacggagcgtgtgagagaatccagataggcatcattgcacattaattgcatataagtatcctgaacctgacgatggaattgttccccttctccgttcaatcttgacagaagataactgaaactctcaaagaaagccatgtttatcggccgtttcttgccgggtaacgaaggcagcctgaagccgcctgacggaagcagttgtatggcaagctccatggcacgtgtaaaccggctatccagttctttaaacaaaccgttttccggctccagctgattgagaaaacgcatcgttttccccaaaaaatcctctacattgcttcggtaatccagaggctcatgggtgtccgggtctatggtgatatgctgctgccacaaataaaaagccgtaaaacggagtaccagatacctgtctttcatatggttgtctggaatggaaccttctgtagcttcaacgaatacctctttcttggccagccggttgatcagtttcgtggcattgccctgatagagcgcattgcgcatctcttgattgttaagccgcgtcccgccacggttcacccggtcaaacaagtcaaaggtaacccggtcactggtaggtgccttaatcacatgcaaggtaagcgaacagtcctctattttattctgctccaacggagtcaaatctgcgaatcgggaaccgttcttgtcctttaggatagtgagtttgtccaaggcaaattcattgttgataaaactgaacaaggtgctcagacgctgcttgccgtctacaataagatacactcccttctcatcttccttcacataaatcagaggtagaggaatacccatcagtatggattctatcagctcgcttttctgtttggtcttccataccagtccccgttgaaaatcaggggtcagattcagcatcggaggagttttttcccatttccgcttcagttggaacacggaagccgattcgcgggctatatttagcactgcgtccggatatacggtattcggctcgtatgtctgctggttggaagccgtccgtatggtatattctccttcaaagtccatttactctccttttttcttcaacagatgcaaatatacgacgtttttttgatacatgacttgaaatcaattgccttttatggattgtcttatgatttttgatagaaaatagtaggagaatgtttttcttttttgattttaaatgatacatttgcaaaaagcagaccgaccaatcggtttaaaaacaagaatcaaaaagtttcattatgccggatgtgttcaagaatatagctgacgccgccggtagcagcagcgtcagacggggctttgccgaccttttttcagcctccaaggcggctttggacgagattcaggcgggtctgggcggaatccttccttccatgccgggtatgcctgtcgccaagttcggcgacctgtccatcgggatagacatgcatcctaccgttacccctccctctcccatcatgcctgtgcctcatgtaggcaaggtgtacgacctcatggcagacctcatggccggcatggcggctgccatgccgcctgcggctgatggagtggccggagtggcgtgcaacatcctcaagagcatggctccgtcggtcaaggtgcataaccagtggattgcgcaggcaggtatcggcatcgtgcatctgccggcatttgtattgcatccggccccgttggtcagcggtatgtccgagtccgagatgtggatgggcagttccactgtcctggcggacggtgcgccctgttcctccctcacacatccggcactctcatgcaacattgtgggaataccgacgattccccgcaaggggaagcccaggaaggtgagcaaggccctgcttgcccccacttccatgctctccaccatcacatccgtaggaaatcccgtgcttgtgggaggaccgcctaccattgatgtgtttgcgctggcgatgaagctggggctgaaaggattgtcaaagctcgggaaaaaaatatcccatctgctgcatggattgatagacaaggcgggattgaatccccggcttgccaggattctcaagaaaacagcttgcatcatattcggtgagccggtggacgctgctacgggcagggtctatcacaccaatgtggacttcgagcttccgggtccgattcccgtcgtatgggaacgtacctattacagtgatgccgccgtggacggtccgttgggatacaattggcaccacagctacaatctgggaatacggcagttggaggaaggggcgttcgcattccgtcatgctgacggacgggagtccttcctgcctgcgctgaaacttggagaatcccattttgaccgcagggaacagctggcatggacactcgatggccggggttacatgcttacggacatccgggggttgcaataccgttttgacggtcccgaaaaccgctccggttaccgcatggtatcgggcatttccacgaaggacggattccggctccgcttcgaatacgcttcggggggaaggctggcaggaatcatatcctcacggggagaattcctgaaagtggaaaccgacgagtcggggcgggtgctctgcgtttccgtaaatcaggacggtgaggaggtgaagctggtccgctaccgttacgatgaccggggcgacatggtggaaaccattgacgcgctggatgtcagcaagcatttcgtctattccggcgggcacctgctggtacagcttaccaaccaagggggtatgtccttccattgggaatacgagggtaagggtgagaatgcccgctgtgtgcatacatggggcgatggaggcgtgatggaatatttcatccgttacggtaagggatatacccatatccgcaatggggaaaatgccgaaaccgaatattattacggtgaggacaaactcatctacaagatagtggatgccaacgggggaattacccgccgccagtacaacagctttcaggagctggaggtaacggtcaaccccgaaggctatacccgcaagacttcctacaacgagttcggactgccggtccggataacggacgagaacggggaggacaccttcctggactatgacaacaaccgcaacctggtctcgctctacactccgtgcggaaagaggctttcatgggactatgacggacaggatcgggtcgtcagccggaccacaccgggtggagaaactgtgaaatatgtctacgagggaggcgtgttgcgtaccataacggacggacagggccgggtttacacgctcacgttcaacgacaggtacgacctggagctgctgcagttccccaacgggctgttccgccggtgggagtacgacggcaggggaaggcttgtgcaggcggtggatgtgaaaggcaatgttacccgttatgcctacaatcgggcggacaacctgatacggctggaagaaccggacggcaacgtgcaccggtttgagtacgatgccatgggaaacatggtacatgccagcgacaacatccgcgaggtcaggttcacctatggggcgctgggggtgttgaaaagccgcgagcaggacaggcactggattacattcggctacaacagcgagttgcagctccggcgcatcggcaatgaggtgggcgacaactatttcttcgagctggacgggctgggacaggtcgttacggaaaccggcttcgacggtctgcggcgtgagtacgagcgcgacggcgcgggtcgtgtcacccgtgtgaaccgtcccggaggaaaatggacggaataccagtacgacggactggacaatatcctgaaggaggaacagtatgacggggaggtctccctctacacgtatgacaaggacggcatgctcgtcagggcgaaacacagcgagaacctgctggaattcacccgtgacaggaagacgggactggttacagaggaaaggcagggagaatacaccgtcagccgtacctatgacagcgaaggcaactgcacccgcatcaccagcagtctgggagcggacattcgtcacacttatgaccgggaaggcaacctgcagaccatgcaggcaggcgagagctggcaggcatcgtgggtgcgtgacaatacggggctggaggtgcagcgcaccttctccggtggcgtaaccgtcagcaccgagcgcgactgtttcgggcgcgaggtgcgcaagtccgtccgcgcgggcggcatcgagcgcggggcgtaccgctacgagtggggcgtcgctaatcggttgctcgccaaggagaacgagctgacgggaacggtcatgcgctacgactacgaccgtttcgacttccttatccggcaggaaaccatccagggctcggaaacggacgtgatttaccgcgtaccggacttcgtgggcaacctctttgagacaccggacaaaaaagaccgcaaatacggtcccgggggaaaactgttggaagacccggattgtttctatcactacgacgacgaaggaaacctcattttccgtgagttcaaacggttgcaggaaacgggcgtaaggtatgaccgcaagcgcatggagaaggagcgcggcgtccgctgtctggctacaggtacgggatggctctacgagtggagttccaatggtatgctaaagaaggttatacgtccggacggaagaccggtggagttccgttacgatgcgttgggaagacgcaccgccaaacagtatttcggaaaggtcacacgctgggtgtgggacggaaacgtacctttacacgaatggagctataaagccgttggcttacaatcggacgaagaggaaaacatccttccaaaagaaccggcagaagatgttaccacctgggtgttcgaagcaggcacgtttgtaccaacagcaaagatacaggatggtaagcaatattctattgtgtccgattatttgggtacacctattcagatgtacgatgaaaaaggaaacaaaacttgggattgtacactagatatttatggaaaagtgattactgtaaataaaggaatggagtttgattgtccattcaggtttcaagggcaatatgtggatgaggaatcgggattatactacaaccgttttaggtattatgaaccaagaattggtagttacatgagtcaagatcctataggattaaaatctggtattttagcaatatatagatatgttaattctactaacatagcacttgatattttaggcttatctcatgcttataaattaaaaaaagctatggaaaatgcctataggcctgttgctgctggacagactccacatcatattgttcaattgaatcggaataatgaatatgtaaacagatccaaagccgtattggaaaggtgtcacataggaattaatgatgccgaaaatggagttgctctatggggtactgctaattctcaagtaactcaatctggacatccaggaagagaagctgccagaactactggtacttaccatgcagggtacatacattcgcttgaaagtgataaacgaatatgtgaattattagagagtgctgagaaatatgcgatagacaataaattaagcgataatttaaaagacaattatgtcagaaaacaattacaaaaaattggaacagaaatagaaagtggaagatggaacaattcaacccattaattcataagtaatttatattaaatatcgacaattatgttaacagatttaaaattaaaaataacaagtttacaaaaaaagaataatattcttcttataaaagaatatttaaaaaatgtacatagatgggaatattcgaccaaggaatattataatctactaccttattatcatttacttaataaagaaaaaaaaggtagacttttaaaaaacatgaccattgaaaaatggaattatcaggacttgttcagatttggcttcgatgaaaataacaaaatgattatttcagagcaacatatagatgcagatatacgaaaaggtttatatatcagtttatatgaatattctaaacatggatataacaaaacctatttcaaatattacccaacagaaaatgaaaatacacccgtaattaatttaatatctatatcaaaatttgaaatagtaaataatgagaattcaatatatgttggagttaatatttatggtgatagttcaactatagaatacttttatgataataataaactcattaaagtcatcaaaacagcctcaagatggaaacataaagaagaatataacttgttttacaataaaaatgaagaactatacaaaattattttaggaaataccatttattggcaaaatcaaaaataaaacaaagcccccattaactcatctcacttagatatactatctttgtgacaagcaacaactaatatgttacaattcccaactgtttcatcagtatagctcaaaatgtccaaaaaaaattcaaccagttataaacgataacattatgaacatgaataatctaaaaggttttgtcttctatgtggatatactaggattttcagctttaacacaaggtaaaatccagcttacagaagacgattttaatatttggcaggtctctaaacattttcagacttcagggaatcaggaatttgcagccaatattttgatcatttttcggaaaatcttggcaaactgccagagtaaataccctacagtaaatttcacccagttgtccgattgcgctttcgtctggtctgaaaacatgaaagatgtcatactttcatgtcatactattatgtgggattgtttgcaaaatggtattctatgtcgtggtggtattgcatacggagatatcattgaagataacaacactaatttgggacaaatgttgctaggaaatgctgtaagtaaggctgtcaaattggaacaggctggggccaaaggctgccgtgttttaatggatcaggaggttccggcatttttacatgactatgattcatcatttttgagcaaaatttaccagttgttccaaccttttgagaatcccttggattaccaaatctatgatgaattcaaatggtattactcccaaagtctgaaagatttaaacacgactataggtataattcaggcaacagtcgaaagattatgcctcgctgcaaaattacaatatcatcccagatttaactggaatgtccggtctcaagagggtaatatccatgtaaaatcatccatgcgatttacttcagcaaatgaacagaatgtttttaatatagagcatacctttgattggaaagaaatggtagatttaaaaacacgaacagcaacaaattataaccgtatagctaaaaaaattcaaggggaagccttatcttgtaccatcgataaagaaggacgcataaagtttcctccagtaccatagcaactattgaacattttttatattatggacattttttctaaagaaattattatacctataacggcagccatactgggcattgccgttcccttgttaattggagttattcagcggatagacgataagtatgaatctacccgcctgatacaactctttatgaacgaaagaagcacaaagcattttcttggcttgctcgctattaccatatttttactgttctatcaattggtcgctccacctaactattttgatttcggagttcttacaaagtacatagattattctgccattattctcgcgacaatattctgtgtactgctaacattcagtatatttatgattttcaggcttatctatatctataatgtacctgaaaagctgcaaaagcatttgataaaaagaaacaatatcccacaagataccagaaaagcgtggttcgaactttttattgccatgctcaaacagaacaatgtggatgtattgcgcgattgctatcaggaattgtatgactggatcatatctttacgtgcaggtaaacaatggacgttaatggaatatccgccggagttatacgaaggcattgtctccattaatgagcagctgtgcatgcaacaaaaggaagcggtttccatcaagaacggaaatgatatagtcaatgcaatgctggatgattttcagttcaccataatgcatcagaatacctaccgtacgatttggacttgtttgaaccagcaattgttttacaagcgcagcgaatggattcttaaatattggggtgcagcccattcacacttgtttcttcatcttacatctttccaacttgatgaacgtataaacgttccctacacttcatctggacaaactgttgcaaacagccaaatggtagagcttaggcagaaagaacggaaagaatttaaggagtttcatatcgcattaggtggacttttgttatatagaaaagaatatgaacttttaaatcaaatattgtattacactaatagccaaccccctcattatgtactgattccaagttcactggctgaaattattccactgtatatggacttgctctcattcagtcccgattcaatgtacaaatacgagcaaaaatatccattttttggtcttcaggctggcgtacgcaacaatagcatcatcaatggctggatacagaaatacttgtatatcctaatgttacgtctggcaacacttaaccgcacctatgtttacgaggatttttattcactgccggctcttcctgaatccttatccgaaaagaacgaatggctggaaaatgttccgattatcctgaaacagattgagcagaattccattccactggaagacatcacaacaatactgccattggatcagtcgtgcatatacagggctaaacataagctgaagaatgcactggagtccctttccaattcgcttacttcaacaatacaacatcaaaaagttactcaacagctgtctgaagatgaaattcaggatttttaccaaatagcatcagatagtattggcagagaaatgaagtggattacagaagtttctgtcataactgatgatgagtacaaaagctgtaacaagttcaattgtgtcggaagaatacgtcagctgatgccggcagaggcattctgtacggataaaacaataggatatgtcaattttaaggagtctttcagtgctgctacactatactctttcaaaaactgctggctccgaagcttccagtatcagcctaaaagtgaatatagggtttttccggagaatcttgacaaggccttccagactttaagattgaccgacaaacagataatcatcggattccacttcaactggtacaatgcttatcctcagaatttacgaaaggaaaacgagtataagttcaaatcccctgacaacagattgttgtatagtctgcctggagatcatacagtcgaatttacaaatactgtgattattctcaacaagtcagacctgcccaaactgaaattacttgatccgccttccacactaaaggacaagtttcatttgaaatgtatcaatgaacaatacaagttatatgcctctgtaatcaaattatccgaaaacaaacctcttctgaatgaatatatcagttcgggagcatacttggaaaaagaattgaaacagatggcattggtttgtacagagctggacgcacagatactatggaagcagaatatacctgttgtcatgattaaggtgctcgaccgctttattgacagcggcaatgaaaatctttccgaaatccgtccgttcaatgccgactgatacacattcggatatcagaatgacacttctgactattagaaaaccatcataaaacatacaggttaaaaattggaaaaacaaagaattgggaagacctctatgttcactgcaaatgaaacacaacattcattaggtcgtttcatttagaaacactatctttgtaacaggtctatacaataaatatatgagtagaatcaagattaaaaacttcggtccgttgaaagaaacagcatctgtaacggacggatggatagatataaagaaagtaaccgtttttacgggtaaccagggtagcggtaaaagtacggttgccaaactggtttccacctttacatggatggagaaggtcttgacacggggtgatttcaaggagaaagaatttaccgccgccaagttcaagaacaagtattgcggttaccatcgtatttccaattatttcataaaggaacagactgagattttctacgaaggggattcctacaagtttacctacacgaagcaaggcgaacttgtcatagaaaagaatgagaatgcattggacagctatgcccttcctcaaatcatgtacgttcctgccgaacggaatttcatcagcatggtcaacaaaccgaatctgattaaggatttgccggatgccttgctaggttttcttacggaatatgacaaagccaaacaacgcattaagagtagtctggaactgcctatcaatcatgcgcaactggaatataacaaacaaaatgacattgtttatgtcaaaggtgaggactataaggtgaagttgatggaagcgtccagcggattccaatccatcgtaccgctttatttggtttctttacatttgtccgaatctgtaaaaagtcaggcgaatagtgcccagaagatgagcagcgatgaagcgaaacgcttcgaagcggaagttgcgaatatatggaacataccgaaccttacggacgagcaacggaggattgccctttcagccgtttctgccagattcaacaaatcggcatttgtcaacattgtagaagaaccggaacaaaacctttatccggaatcgcaatggatgataatgaaacagttgctggcttttaacaatgctttggaaacaaaccgtttggtagttacaacacatagcccataccttattaatagcctgaccgtcgctgtcaaagccggtatgctgttggctgtaggtaatctttcctgtgaggtacaagaaaggataaatgctatttatcccatagaagctgccatacaccctgacgaaatcgctatttacgagttcaacgaggtcgaagggacagtaacagtactggacacatatcatgggcttccttccgatgagaacttcctcaacaggatgctggagagaacaaacgaagattttgccgatttattggaaatacaacaggaattatgattgacttcttcccgacacaacatatatcatcatcaaacagacgcaaattcggtatatgcgaccggccggctcctgccgctgaaaaagcatatattgcagaaagacaggggcaggattggattgcggcagtggacaattatcctcaggtaaaggtgaatttcgtaccggttgaccattgcattgaactgcgcagggcggacgggagtatggacaaccgctgcgacggctgcctgttttatagagatacgattatatttgtagagttgaaacaaagaaaaggcaagggtaatcaatggataaaagacggcgaacagcagttgcgttctaccattggttattttgaacaacaggaagaggcacggaattttcccataaaaaaagcctacatagccaatagtgaaaaacctttgttcagaaccggtcaggcagtacgtatggaacgctttttctcggaaacaaactatatactgagaatcgagaacagaataaatattgaataattggttgaccctgcagtgattttcggcgaaaaacggaactccggtacgaaacttgatgcctacatttgcactgttaacaaaatgtttcacttaaaacctgttgatttatggactatatccaaaagattaagttgctgaacgagttgatgctcaatgcaacaccgcaaaatgtagatttcatgccgcaaaacggcaattattgtgtggcactgatagctacgcgacctgttcacacttggggataccaaaagcgtaacttcaagattaagggacgcttggaagaaggcaagacggtctctgccgatttgatagcggaaaatgaaatgctttttggcgtggaagacctgccttacgtggcccacgagggtgaccgtacccctatcttcaagataattcgtgcttccattttctgtgcttatgcggggttgcaacttacagacctgcattgggggatgcggaagattgcctggtcagattatcctttcaagagaccggataaggaagaacaggcaaaagcagaagtcagatttatgaaacgtctggcatcggtaatgactgttccggatcattgtgtggtaggacgttccgtggtaacccatctcacttccacccgtttgcgggatgttatgctgtacaacaaggagtacgaaccgtccttatatggaaagataaaggattcaatagaatccttatttccctttattccggcaaaggatcatgccgataatgtggttcccgatgtatttgtttcgcaacaggattgggaaaatcctcgtgacacttatgaacatcaggttatcatactcaatgccaaaagcaaaaagaaagaacagttctggtgggattacttgaaactcaatattttcctgagcgatttggagtattatttcggctactatattttgatgaaccgttggcagattccgatgattcagaggtggattgccgaatatcgcgaaaaaggtttcttcgagtcccagcgtgcgaaggattatattctgttctatttgaaagccggagaaaagacaccggttcgtgttttaaactcacagggggtgcaggttaagatgaagatgccttcaagataagccggtaacataatgtttctcatagggaaaagcggattatgtatatttcataggcatttctttgccgatagaatgcataattggcctttccctttgtttttatggtatatatttatacttttgccgtaaaaaataccatccggtcggtattttttagggatatggtggaacagggatagaatccggttgccagaagatggaataacaaagacatagaggaacatctctgttttgaaattccactttctgtttgggttcctctatgccgaacaaaccgactaatcggcttatttgaagacaaatataagcaaaaaataatatatgtataagaaaaaaaagaaaaaggcatcgttggcatttatttcataaactggtatgtatggtcataaatgatttaatggtaattgggtaggacatatttaattatactaaaaatgaacgtgttttcactcaaaagacctacttttgtatgatactaaaaaacaaggttatgaaaggagtaaaaggctcagaaacaaaaagattaatcagggaagctgcatacaaacagtttctgacaaaagattacaacacggttcccctgaaggagatagaaaaaagtctgaatttatcaagaggatgtatgtcatatcattatccaagcaagcaagaactgtttattgatgtgattgatttttacatttttcacaaacaagatgccaaaaataagttcaaggacatttctcacacctctctgcttgaatttattgattattacataaagaaggtggaggaaacgatgaatgcaatgaggatctatctcatagaaaaagagaagaccaatattacacgtgcatatcttaacttgattttgcaggcagaatatttctatccgggatttaacgaggctttcaacgaaataacaaataaggagattaaattatgggaaagaatatttgtgaaggctgttgaaacaaaagaaataagatccgatgttaatccttctacattggctttgacatttcgaatcctgctgtttggaaaatgttttcaggatgcattggtgaatggattgcgaatagaagaactgaaagtagttctttataatcaatatgaactaattaaaaattgaactaatgaagaaagatgtttttattactgggcttgcaagcttctttccgaactctcctgtttccaatgatgaaatggaagagttcttgggactcatttctggaaaacattccaaagtgcaacggatagttttaaagcaaaatggaattaaacggcgatactatgccttaaacaaaaatcaagaaatcacacatacaaatgcagaaatggcgatgctggctatacgtaagttgctggcattgaccaataagagccaaaaggacattgagttgcttgcttgtgctactgcgacccctgatcagattctgccttctcatgcgtctatggtacatgggctttgggaagaacctgttgaaatattctcttctgctggagtttgtctgtcttgtctgcaagcgctgaaaatagcttatttgagcatagctgcatcagaaaaacagaatgcaatatgcagcacatctgaattggtgtcagcaatgcttttatccaaaaacttcgatatcgaatatgaaagatgctgcaatttgggcaccaatccatatatggctttggaaaaggacttcctgcgctttatgttaagcgatggtgcgagttgtgcattattggaaaatcatccgggagaaaagggcgtatctttaaagattgaatggatagaaatggattcatatgccaatgaaacccctacctgtatgtttgccggagctgtccggagggaggacggtgaactgaaaagctggaaatcttttgaaagtcaggaattggtcgatgagtcccttatggttattaaacaggacattaaacttttagggacgaagttgatgccgttatggattagacatattaaatcatgtctgaataaacatggcatgactcctgacgatgtggattatgtaatacctcactcttcgtcaatggttatttatggtaatctcattgaagcgatgaaaaacgagagttttgaattgtacaaacgagagtggtttaccaatcttacctgggtgggaaatatcggatcgtcagcaatactggctgccttggatgagttctgttctacccgtaaactcaaatccggtgaaaaaatactgctgcttgtccctgaaagcggacgcttttcttatggaacagtgctattaagtgtcgtataaatttggaaataaacgataaataacgtatttttgcgctgttaaaacgacatagtatagtatcatatatcatcttccaaacgaaaagtggaaaatttcaaagagacaagatggaatatgacagcttgcgctatattaaaatatatagcacaggtgcgtcacttcgtctctaggtattccactaccatgtttggatgttgattgcgtctgtgctatttttttataatataggcagtaggatggacccgaatttgaaacagcggattatagaggaggcatacaggttattcatcacaaaaggaatgaagcagacctcattctgtgatgtggctgttgccgtgcataaatccaaaggggctgtcatacactactttccttccaaaaagaaactgattgatgcggttgtcagaatgcgttttttccccgactcgcagatttcttgtgaaatgtattctttggctgacaaggattggaatgagtttttaaggcaatacagaaatccgatagaacgggtgataaacagttttcccgaacatctgaatggcaatctcctgatatgttatatgcagtttgtttcctccgcccatgaatatatggacgaatttccacaaatgtatcagcaacttcttgtccgggaacaggactttctttccaatgtggcttatggtcataaaataagtttgaaggatgccaaggcgttcagcagacaggcattgaacacttctattggtaagactttcttggggatgttctcagaaatttaagcccgcattcctttccttttcctccctttcagttcattccgttgtcttttagactgataaatgataaaactttacttgctggaacctgttttttttcattattcttggaaaaggcttatctttgcaaaataaaccgactggtcggtttattttgcaaagaattttaatagaatataatgaattaaaaagtgaataattggaaagtaggaataaattgttgaaatctttgcgcctgcaaccgcttcttgccaaaatagcggtaggatatatggccaagattgtagtcataagtggtattgcttacgttggcatctgcgaatggaaagagactaaggctagggaaatggaagtacggatgattaaccggaaaaagcatgagataaatgatatatacgtgaaaatgctcaggctttctttcttctgtgaaacctttatggagtggagtgagcaggattttttatcatttcagaaacggagacggcacattgacagcctgttgtgtagcttgaggtactcctcttccggctcacatacagacagcatccgtaatttgtggagagccaaggagcggtatatgcgggaaatcatatattgggtacacaggcaggaggaagccgaccgggaaattgcagcgaagattccggccattgccagacagagtgaacgggaaaatgccccaaaagggggattcctgaagaggttgttcgcaaaacgccacagggcggattctccttctgccgcctccatgcttcatgagcttaatcggagcgtggttggcagacagcaggcgtatgcccggaagctggcagaacggacggacagcttggatgggatgaacagaaggctgaatgtgcagttgcggcagatgattgagaatatggatggaacggtacaagcggacttgaagagacaggaagaagaagttgcggaagccgggaaacggtcatttgccacggtcatcggtctgacggcattcatggttttgctgctgatatggtcctatatggtgatacaccgggatatgatgcgtataaaccgttataaaaaaaggctggaaggcacagtccgtcagttggagcagaccgttcttgaaaacgaggaactgattgaggcaagaaagaaaatcatgctggccgtaacccatgacttgcgtgcgccgcttgcttctatcagcagctatgcggaattgctttccacggaaagagaagtgtcgaagtgcagggaatacagccggaacatacggcaggtggcgggacacatgtcttccatgctgaattccctgttgggatttttccggttggagagtggcggggaaaaggccgttcctgtcccgttcaggttatgttccgtcaccgagattttggaaacggattttatgccgctggcggcaggaaaaaaccttttgctgaacgtgctgagtgccggagatgcggttgttataggagatagggacaggataatacagataggaagcaacttgttgtccaatgcaatcaagtttacggagcggggaagtgtaacggttcgcacacaatttgaccagggcgtattgacgcttatcgtggaagataccggcaccggaatggacgatgaggagcagacacgcattttcactgcattcgagaggcttcccaatgcgattgcggaagaaggggtcggactgggactttcaatagtaaaaggtctggtcggattgttggacggcaggattgaagtggcaagccggaaaggggtgggcagccggttcactgtctgtcttcctttggctgtggcagaggaagcgatggcggagagcggcaggagccggatttccgtacggtcctatacggtactggtattggacaatgacaccgttttgctggcggcaatcagggaaatgtttgcgtatcacggggtggcttgcacggtatgtgagaacacgcgtgatctgatggagcatgtccgcagccgtagttatgaccttttgattacggatttgaaaatgccccggacaaacggattcgaggtgttgaagctcctgcgcatggccaatgtgggaaattcacggagcattccggttatcgcgagtaccgcatcgggaaactgcgatacgggggatttgtatgcggcagggttttcgggctgtttgaaaaagccgttttccgccgaagaacttttgcaggtatgtacggaatgtctgggaagtgaaaggcagtctgaacagatagacctcgatgccctgctgaaatatgggaacaggcggaagatgctggataccctgattcgggagaccaggaaggatatggaggctatggctgaatgtgcagaaaagaatgatcatgaggcactgaaagaatggatacatcatctgacaggctcatgggagatcattcatgccggcaagccgctgcatgagttgttcgcactgcttcaggattcgggagagttttctgtggacgagttcgggcggactgtacagcaggtattggaaaaaggaaaagaaataatatgtttggcacaacaggctaagaaagcttatgagagtaattgttgttgaggacaatgtcttgttctgtaattatatctgcaattttttgcagaaggcggatttggatactgtaaggacttacaggctggcacaggctaagaaggtcattgggacatccgtccgtgaggatgacatcgtattggcggatttaagattgcctgacggggaaagtaccacgctgttgcagtggatgagggagaacggctatatgcacccgttcatcatgatgactaattatgaagagatacattctgcggttcataccatgaagctgggtgcggaagattatatcctcaaaccgctggttgaaaccaggctgctgcccgtaatcaaaaaaataaggacggtgaacgaggctttcaccaaggtaatctatgaacgcaaaagcacccctttttgcgagttgaaccggtacattcacatggtagcgccgacggatatgacggtactgatattgggaagcaccggaacgggaaaggaacacctggcaaaaaagattcacaggcagagcctcagatccggcaagccgtatgtaacggtcgattgcggcagtttgtccaaagagctggcaccttccgcctttttcggccatgtcaagggggcgtttaccggagccacagaggaaaaggcaggatattttcaggaagcgcagggaggcaccctgttcatggatgaggtggagaacctttcgatagaaacgcagcggatgctgttgcgtgccatggaggaacggcggtatcgtccggtaggcggacaacgggacaggctgatggatgtgcgcatcattgcggccaccaatgaggatttgcaggaggctgttgcggaaaagcgtttccggaaggacctgctttatcgctttcaggattttaccatcaccgtacctgcattgcataattgcctggaggatatactgcctttggcggattttttccgggagcaatcttgcggattgctccggaaagaggtcttggattttgacgaaccggcaaagaagatgctgctgggatacagttggccgggaaatgtacgggaactgaagcaggtcattcatgcggcggtattgatatgcaaaggaaaactgattacccccaattccttacggctccaatatgcgggagagcccgtttctgaccccatggggaaagagaagatagacaagtgtttgcagaaagatgaaagaagaaacatagaacagatcaagacggctctttccatctctaaagggaacctgacacaggcagcggccttgttgggaatcagccgcccgaccctttacaagaaaatgagcctgcacggaatttccagataggtttgtttgcgatacagttttccccctcatcaaaggaaaatcgaatttgtcttgccggccgcatttgccgaatcttttcgtggaaattttccttgcggcttcgccgtggaaaattttcacgaaaaagaatgcggcggcaatccagattcgatttgaaaaacgattacaggggcaaactgcgaccgatgtgacgcatggataaaggatatgggctgcttgaagaggccgtatttcataatccatgaaattccacatatccagccggaatacaggtcttatgaaagtcttgctgtaaaaaagcggaaggcatgagaagacagggggcttcagctccctctgttctgcatggttttgtcttgcctgcccgcctgctcttttctggtgtcggatgcgcaggctttttcccttctgcctcacgtatcttctctctttccgtttattcacttcccttcttctccgttcacggtttagccgttgggaacagtcatgtttatgacatctgacgacatttgatgacatctgatgacacctttttgaaaatcagcatattatttggaaataccccatacctttgaagcgtcaaagcaattcattaacccctaaaagaaaaggtatggcacaagaaaagatcccgaacgaaaagcccaaacggacccggaaaccgaaggccggaagtgatgctcttccggtggaacagattacggaattgatgcttgttcataacaagaacgatccgaaattcggtgtacaggctgtcagtgaaattgacaaggacggaaaagcgaagacggttccggcggacgagaagaatgaaaactcattcctgaaattcgacaagaattcgagtattctcgaaaacttcatcaagaatttttggagccagctcaaggaacctacccatttccgcctgctccgcatgacctaccacgactacaaggtgaacaagcaggccatcagggatttgtcggagggaaagcagacggatgcggtgaaagagttcctcaaacgctacgaaatccgtccgagagaaaacaagaaggaacaaagtgtaaaccaaaaagaaaaaacagctatggcagacaaagagacacaaccgcaggaacccctgcaacagagcgaagtacagcaggcggcacagcaacagcagcagccccaggctcaacaggcagcgcaggagtcgcaaggaccgcgttaccggtataatgagaacatggtcaactgggaggagttggaaaaggtcggaatctcaaaggcttcgctggaacagcagggactccttgattccatgctgaagggctacaagaccaacaaactggtgcccctgaccatccatctttccggtttgctgacagccaaactggatgcaaggctctcactcatcccgcaacaggacggacaggtgggactggccattcacggcatacgcaaggaaccgcagttggagcgtccttatttcgggtttaactttaacgaggaggacaagaaaaacctgcgtgagaccggcaacatggggcgtgtggcagaactcaacctgcgcggcagtgaatataccccctgtctgatttccatcgacaagagcaccaacgagctggttgccgtccgtcaggagcacgtttacatcccgcaggaagtgagcggggtcaaacttaccgcagaggagatcaggctgctgaaggagggacagcctgtcaaagtggagggtatgacttccaaagcaggcaaggaattcgatgccacactccagtacagtgccgagcgcaggggactggaattcatctttccgaaaaaccagattttcaacgaacgttccatcggaggcgtgcctctctcgcccacccagataaaaatgctcagcgaaggacataccattctggtggaagacatgaagttcaggaacaggaatgacaccttctcgtcctttgtaacgatagacaaggttacggggcgcccgaactacacgcggcacaatccggaaaccggagagatttatattccaaaggaaatctgcaacgtgcagctgactgccgaagacagggaaaccctgcgcaagggacagccggtctatctggaaaacatgatcgggcgcaacggggaggaattctcctcgttcgtcaagctggatatgaataccggcaggacgatgtattcacgcacgccgaacggattcaacgagcagcaggcaccgcgtattccggcggaggtttacgggcacgtgttcacggcacaggaaaaagcgaacctccaggatggcaagactttgcttgtcgaagggctgaaaaacaacgggcagaccttcagttcctacctgaaagtcaatccctattccgggcagttgcagtattttcaggaaaatccggacatccgcagggacacttcccgccgtgccgcacagacggagaccgcacagggacaacagcaggagcagaagaagggtgcatcgcaggcagtatagacctgcccggagagaaacagaatcaatcatacaaacctaaaaaaacgaatcgtatgaatacggatcagaatacccgtcatatttataagacggaagatatcgactgggacggtctgaaggccgcaggtatcagtaagaaacaactggaagcggaaggcaacatggaactgttgctgcaaggaaaggaaacgggcatcgttccgctgaaactccatatttcggtcctcagcctgacaatggatgccacgctgaagctggtacccgacggcaacggcagaccggttatggaaataaacggtctccgtcagaaggaggaggcggcagtttgaccgggaaacaataagtataactcacgttccgtgccgttcctgacggtacggaacatcaaaaggaaaaagaatatgatagcgatagtgactgacaagcccaatgtgggcagagagatagcaagggttttgggagctgacagaaaagagaacggatatatgagcggaaacggatacatggtaacatggacatacggcaacatgctttccctggcgatgccgaaagataccggtacggcatgggtggagcgggagaacttccccctgctgccgcctccttttctgacggtacggcatgtaaagacggacacgggatggaatcccgacatcaatgcggtgctccagttgaaggtgatagccggggtgttcgatgcgtgtgacaccattgttgcggcaaccgacgcttcccgcgagggggaaatgctgttccggtatctttatcgttttttgggatgcaggaaaccttgcctccgcctgtggatctcctccttgacggacgaagccattgccaaaggaatggaaaaccttcgtccctgcagcctgttcgacaacttgtttttggcggcagacagccgcaacaaggccgactggcttcttggagtcaattcgagctatgccgtctgcaaggcggtcggtttcgggaacaactcgcttggaagggtacagacccctgtattggcagcgataagcggacggtacagggaaagggaaaatcacattcccgcagacagctggcccgtattcgtcagcctctgcaagaacgggaagataataaagatgcggcatgtggaagatttctgcaaccgccgggatgccctggaactttacgaggactgcaaggcggcaggatatgcccgtatcacggcggtcaacagccggactgaggaaatcaccgcacctgccctttataacctgaccgggcttcagaaggatgcgaaccgttaccataacctgacagccatacgggtgcaggaaattacccaaagcctgtatgagaaaaaactgatctcctgcccgcgcacttccagccgtctgctgcccggagacgtgtatgacatgttgcctccggttatggaaaagctgctgtccggcaaggaattccgtcaatatgccggtatgatcgaccttgctgcaaggaaaggcgtaaccggaaatcaggacacggcggagcatcatgccattgtcatcaccggcatacagccgggggaactggacagggaggaaaggctggtttacacccttgttgtcggcaggatgcttgaaacgttcatgccgccctgcaaggtggaatatacgacggttgaagcggtctgtgccgcacgcaagttccgaatccgtacataccgtattctggaagcggggtggctcggtatctttcagagggaacggcttgtcgcggaagacaacgacctctgtcccgtaccccctgaactttttcgggaggagaagctgccggtaacgggatgcagccttatacacaggaaatcgctgcccgctgccccttatacggatgaggaactggcggactatatggacaagaccggtctgggaaccgcatccacgcgcacgaatatcatccgtacgcttctggagcgtaaatatatccggtattcgggcaaatacattatcccgaccccaaaaggtcttcttttatatgaaacggtacgcggaatgaaagtggctgacgcctccctcacctccggctgggaagcggagctggcacggattgaacagggagaactcacacagaaagaatttctggatggcgtattggaaacggtaaatgaggttaccggtgagattttccggaaactttcggaagatggacagccgcatggttccatatagacggctgggcggaaggtacggaacagaagaggtgcagactggggtctgtgcctcttttttatatatgtacaagatacgtttttccgcttttaagcggcaaaggtcttggattgcctcgtttttgccgcaaggcggcccctttcaggggctggtcggctaaaagaaaatcatcctcgcttcgctgcggtattttcttttgccaagccttgcgcaaaaaggcaatccaagggccggaggcctataaaatcgggaaaacatatcccgatgggattattcattcttaaaaatttaaagacatgaaactgaaactcatcgaaaacatctgcaggcaagtggtcgcactggttctgcttacgggaatatgcctgctttactgcaagggcgtcattcccgtgtacctgtctgtcctgttccttatgtccggaacactggtccgtctcgccttcaggacattcacctttgtcttgaaaacaatccttgtcctgattgtcatgggcatgcttgtataaccatcaaatgcagaagatatgagaacttacacatttacatcctcggctccggtcatgccggctgcatggcctgccacaaaccggacaacacctgtcaaaagacagcctccctgtacgacagacgggcccagacgtatcggctactatctggaaccgttgaaaggcatcgcctcgaatccggacaggcagagaatcctgaaggattttttcaaggaaacttatgtataacattttaaattttaccattatgttttttcaagcaatcaaccaaatgattacggcaggcacagacctgagtatcaacatcagacgggtaaacgacaatctgacggttgccgtcgttcccagacggtcgggagtaaaggccggcgaacgcattgtcccgctcatcctgaacggtacgccggaagaactggatgcaggattcctgcaggctgtcggtgcacccgtacagaaagcgcaaggtatccttaccaacctggaatcgttcgagaagcaggcagagcaggcggtttcacaaagcaaaacctccaagcctacggtggaaaaggagtccaaggaagcccgtgaaaaacgggaaaagatggaaaaactgctgaagaaagctgaggatgccacggcaggaaagcattattccgaagcattgacctggctcaggcaggctaaggtactggcacagccggacaaacaggcggacattgacaaaaaaatggcggaagtgcagaagaaggcatccgagggaagtctgttcgacatggtacagccgccggtaactgatccacagccatccttgcagcaatcggctccacaaccgatggcagcccagacgccacaataccggagcgaagagcaagttccgatgtccatgcccgaacagcctgccccggctccgcaacccgttgcacagccgcaagtacagcccgtacaatataggcaacctgcaccgcaaccggttcctcagcaggctgctccacaaccgcaagaaatccagttccatcaaccggtacaggtgccgcaaccgcaattggcggacaatcgctggatgcaacaaccggctccgtcacagtatgcaacggtgcaggaggctgcaatgtataacttcgacaaggattacgaggatgaccgggagctactcagggaggacccttatgcggaatatccggactttccgaaggaatgccgcatgacggatatggcacaaatggatatggtatattgttaaaccctataaaagaaaaataatatggcacttgaaatcaaaggattgcagagagtattcaaattcaagaaggactccgtggagctcgtgttggatgatccgaacagcgaactgtccgtaaacgaggtgatggacttctattccatgacctaccctgaactgactacggcaacggtacatggtcctgagtgggaggacgacaaggcggtttaccgcttcaagacaaccatcggagtgaaagggtaagcggtatgaacaagaaaaaaaaggataaggaaacatgcagacagctttcagaacaagccaaggatggactggcacggctgattattctctcagtaagttcgtcccacatccgaaggggaacctcggaacggaaaagaaggatacttctgccaccgggaagcacaatgcttttctgaccggtagaatcacaccccttgcaccggattattggcatcaggatatggataatgattctccggtcaatctcacgactccggaaaattttgactatctctaccggtcggcatcaagatatgcggaacttatgggtataaaactccctttccgatacaggaaagggggttgcccccgcctgaatattaccgagttgtacagagttatggaagagtgtgtaccggagtgtatcaatctggaaaagaaggacggaaggctgcatttctgtctgttccgccatcatgactggccggaacctactttgttttggattccggttgattttaccgaacggctttcggcatcattgaagaacattgtcagggagttcatccggctatttgtccgacaccacagactgtacgatattactgagacattttgttatgactttgccatagaagaactggaagactggggaaaccgggattccgatgcttccccgaaggaaatcagggcgaacaaacggctggcagattcctatcagtctggaaaacggatgaaagcactcagacggatgtcgggcaaaccgttctgcaagtctttggaggaggctgtgcggaattaccggacaaaaaaggaaaaagagctgaagctgttggaactgattgaggacggcatggcattgattactccggaaagcccggtattgacaggctaccagtacgattgggcttatgaagaggaatgcgattttcccccggtgggaatggaaagccaggtcatactggtctattctgctgatgatacattggcggagtgtgtcaaggggtatatgaattcggattatcaggaaacctatgcccttactccggtcacttacaagctactgacaccggaaacggacagtctttttcagatggatgactatccggaaaggctttccagatggttggtgtgttttacaggctatattgatgacaacttttaaaacgaatgacatgaatgaactgactaagaaacttcaacaggtgatggttcccaaagcggcactgattgcttacgaatacagtgatggccgctatggacacgggacatattatctcgaactgcatccgatcaacgacagaggccggatggaggctgccgtccccgttacgtatgaatttatggactcccttgtggaatactatacggataaccggcaggatgtaccgcatgggaaaatccccaccaatatgctgtggtgcgatacacgcaagggacacgagaggtacatctggtacaatcctccgggaaaacggcagatgttcttttccgaaaggctgaatattccggacgggacattccatgtacccggtgtcatttacagggcttccggtgacagactggaaatttttgcctataagggagaagcaccggcagaagacagcccgcttttccttgccccgtttttcaatgtaacgggaagcagtgtctgcctgggaaatgcctcgttgactcctccggaaaacatgactttctcaaaactccttgagcattgggaaaaacgcttctggctcagtgaattttcccatttgggaggaagcaggaatcccaccgaaagcaatctggtttcggtgacggaaaaggcacggaccaatccgtttgactataacgaattgaaacctatggacagacaacttaaagacttattgatatgaaaaagattcattatacagacagatacctgctcaatccccaccatcccgtaaccgttttcgtaatcggtgcgggcggaaccggatcgcaggtggccaccaatctggcaagaatgagtatcgcattgcaggcactcggacatccgggcctgcacttgacggtttttgaccccgatactgtcacggaagcgaacatcggacgccagttgttcagcgaatccgagctcggactgaacaaggcggtggcacttgtaacccgtatcaaccgctttttcggcttttcatgggaagcaaaagggcaatgctatccgtcaggaacatcagattccgttttggcgaatatcatcatcacctgcacggacaccacccgttcacggaccggtctgtggcgttttttgaaaaagcatagggaacgttcatacgatgacgagaaatcaccgatatactggatggatttcggcaatgcccagaccaccggacaagtactgataggtaatgtcaaaagcaagataccgcagccctcctccactgaatacctgcctatacccaagatgaacgtcataacggaggaagtcccttattccaccatcagggagaaggattcaggaccgagctgctcgctgactgaggcattgcaaaaacaggatctcttcatcaattccatgttggcacaaatcggatgcgacgtcctgtggcgcatgctcagggaaggaagaacgttctaccggggagcctatctcaatcttgacacattacgggtaaaccccatcccggtatagaacacaaacgtcagtttctcctgatacataaaacgatgtataggagaaactgacgttttggaacactcctgctatgcggtttaatatttcagccgtacggcatttgccactcccttttccgtcatgaccagctcataccggtccaacttttcatagagtttgcccaatgtcttgcatccatatctcctgaccttgaatttgggcatcatttttttcaatgcaccgccgatcagtgaaagggaaacctcttctttgccgtcagccgcctgctcaaaagccttgtcgaaatactccatatcccttcggataaagaattcgggagtgttctcctctgccttgctttccttccggtcggcatacaggaatacggaacaggaccgtaccaatgacaccggggtctttccttccccatatcccagcactttcaccccggcttcccgtatccgttgggcaagcaggctgtaatcaccgtcactggccaccaggcagaaacagtccacctgcccgtcccgaagaatatccatcgcatctatgaccagtgcaatgtccgtcgtgttctttccgggaacatgggaggaagcttgtacaagcctgaatccatgctccctggcactttccttccatgcggaaagcgctttcctcgtccagtctccataaattcgtctcacaacggcatccccgtaacgggaaacaaagcccattatatcttccatcctctcaaaggatgcgttatccccgtcaataaggactgcaacggtatatcttgaattggcatttgtcttcataacaactgtttatgaaacaaagttagcataactttcccatgttggtattcccgcccttatcttttttcccacgtttctgtaaaaactcctgtatttccgagcttctgtagaagtttttcccgttatcgtccgtctggtaataacggatcagccctttttccctgtaacgggcgactgtccgcaatgacacgtttagcagtttggcaatgtcatagttgtccaaaagctcgtctccattcaggcagtccttcacgcgtcccatcctgtccagtttcttttctatacggtcaaaaccttccactatggtcattatcattttttcaagcacttcattgtctatatacatcatggcaattttctcctgtctttttaaaggttattactggaatacccttttcttgtgcgcactttcaagagtatatgccatgttcagtgaaaaatgtatgccacattatccgtttatattggacggggaattatataacactgcaaatcaataaaatacagatataaaaatagtataggggaaattgaaatgtaaaaattcgaggtgtaaaattgtaaaatccgaatgtaaactttacaatttacaggtcgtcagaccttctccggatcaggactgatagatggcgtttccataccaggcgttttacttttgccggcgaaggcatctgaaaggtacgggcaagaaatacagcaccttccactttggcaccggccctttccagattatgggcgtattccatcaggctggatccgctggtcagcaaatcatcgacaatcaccacgcgctttccgtacagatcgtttgacatcatatagttggcggtatttatttcagagcgtttttctgaggcgtgtttacactccctgctttccgtaatgcatattaaatccagtcctgaacggacatagccatgcgtttccagaaaaccggcaatacctgagaaacgtctgtaatagcggtctgatgtgctgcacggcataaacatggcagtaatatcctcatcagtggaaagaagcaggaatgcttgtgaaaaatattccgtacagctgtcttttccatccttgaaatcatatactttttgcacgaatgccaactggtcatcacaaagccagctttcaaagcgtttgggaaaataatagccggcaaacacgcagcgaatgctcccgaatgagaacaatcgcaacggacggactttatcaaacagctcaggacaagtcagcgcatataacagcggtgcatgaggatttcctgctatgatggcttgacgtagcggtttctccctgtcttcccgctcatcgtaggctgctgcatattggcatagcaccttgccgcacttttttctccagtattgtccgtatatccagagaacgatagccgttagtaataatgttgcattgattatcagttccatatttcctgtttttttattttcggacagattgtccgggataaaaatactgtttttccggtaaagaaacagacttttagccattcttttaatttgcttccccaaacagagcggtctctgacatctgatgacatctgatgccgtttgatgacatccttttgcccatgacttttacttcccgtattttcgtgccggacaaaaaaagcagagtttatggaatttgtatgtatcgaagctaaggcattcatggaaatgaatgaggctttggaagccgttgaaaagagaatgcgtgaaacatgcggaggaggcatctgtagtatggatgactggattgataaccaggaagcgtgtatgcttatgaatgtctcgccccgaaagctgttgcaacttcggagaagcaggattatcccttacagccatatagaccgcaaggtatattacaggcgtcaggatattatacgttatttggaaaacagtattcaccatgtaacccccgaatccttatgactcaattcatactgaccaaagaaagccctgagattatacgtttttttcggaacataagcaccctgtccaaaatgctggatgatcaggagaaaaaccttcgtccggtcctgaacggagagcgttacattaccgacagcgagttggcggagaaattgaagctgacacgaaggacgctggctgattacagaatgaacggcaggctgccctattacaaagtaggaggcaaattattatataaggaaaaggacattcttgttctgttggaaaaaaacagggtggaaacatttgatcattggtaatacccgtttccaagtatcacgacataaacataagaaagtcatggaaacgataaaaagagagggtttcatggctttcttattacagaaccggcagattatacgtttttttattttggaatcatatatcggtcagcatttctatttcttacatgtaaaggtagccttttgcttctgatgcgcaaggcggtccttcggactggttggctgaaaaaatcatcctcgcttcgctgcggtattttttcgccaagccttgcactatcagagcaaaagacaaatgtctgacatgtaagagatagaaataccggctttgccaaagccggaaatgtttaatcacaaaataaggaaattatgattcagacaacaaacaagtatagcaaagaaactttcatccgcctgaactactggtatgatcggatatatggacttgtacaggaagatatagataaagtgaataccatggtggaacacatcgaaaagacacgctccggccagtatccacggacaggagacaacctgttctttgtttccggttatggtgagcgttcccggctgttctttatagatgccgtatatggagataacattatactccgggatttttcccgtgttccattcgtgtcccgtgacaaagagggtatcaaatgcgatatgcatggcggtgagtgtctgttggtaaaggcaggcgatgtaaggttcaaggcatggactaccggccgtttcaagcattgggggcattacggggcatgtgaaaacggggaggtttactacgatgcgaaaatagccctgtgggagtgtggcgcacctgaacagccggaaagccgggaatggttcaaaatccatatccgcaaaaacacccggccgagcgaggatatgtacgtcggagaaatatcctgtaaggatgaggatggactcaaacagtttgtcaacgaccatgaaggtaccatattcgcagaagaggattctcaggaaatggtcatgctgtgtttcaggcattccgacatgaggatttccccggaagaatgggaaaagatggattgtccggtatccatgcgtgagatatacggacagatgcatgaagtaaagattgtaaaagaccataaaacgcatctgaccacattctactattaacatagtatcaccacatgaaaaatcacccttgtttcctcctgccacatatgacaggaaagaaacaagggtatatcatcaggcagtcttttcaatacatctattagatatggagcagattgttcttcctgcacaaatattcattcagatccttatatccggaatattcatgcgaaaaatcgcatatacggattccgtatttgtcctttaatgcctgcaccgcatttttcccggcggtatcattatccagacagcaacggatgccgtcatattgtgaaaggaaagaaaaagccttctgtaagttactgacagaattcaacactatataatccccctcttccaaagatggaaaagccggtctgaaagacagaaaatccataaacccctcaaaaatatagcaaatcctgctttccggcgtgctaatgatgcgactgatgtccttgggagcaatacaagccttgaaatacctgttcctgatttcgtaccctccggaaatattagggaaagcgatggcaaaataattcttcccattccgtttaaaatgggcttccctgcatatttttcgggcagtttccagatcaatgcaccgttccttcagataagtaagcagtatccggttggcaagaggaatgattttcaaatcttgaaaggcgggatatgccttttcaaacggacaggaaacagtaaccggtttcagtacggctcttttatcctcaatacactgtagtacataacctatatcttgtgtccgataaatctccttggccaacgttataatatcccctcccttccccagaccgaaatcataccacaattccttatggaggtcaaccttgaaagaggcttccttttccgtcctgaagggcgatttgtaccatacgctgttcccacgctgtattaccggcttgtatccgaatccggctaaaaaatcaacaagcctgatgttctttgcttcttgtatgttcatggcatctcattttcatggattagttcactattaatacacgacaaagaaccgctttatatccgaaacataaaaagcagtgtcatcagatgtcattaaaagtcatcagatgacatcctgtatatcctttttacatgaatggctcaaaaacttttctgttttggcatgcacacctccttcatgcagcaatgccgcaaagtatgataaaggcatgaattataagtaaaaaaactgtacaaaataatatttatggagaagttatgacattctgaatagtatctgtatatttgtaaaatccaataacacataatatatttgaatggtataatctgtagacattatatcgaataaggttttagggtattgataaccaatagccctgttccttttcagtataggctctattttaatacagtggaaatttaaaatgttgactgccgctttactataaactattaatttaaaaaagtatttatgaacaacatgaaagatttgattgcgttatttgacaaccacaagatttatgatacggatatatggacaaatttccttattctattggtgtttacagatttgtatttaggtgtgtgttgtccccaaaaagaacctggaattacgtttcaggatttaactctaataaacctgattccattcgtaatattaggtattgtctgtatttggactgtgaaattttttacttgtatcctctttgcattatgtacactagcagtacccttaattgggaaatatatttttctatttaataatgaagaagtttcgatatttacgttgaaagaatatgcaatgaaaaccaataatactgtgattgcacaaattgtaagcgatatagagatacaaaaatcaagaaaggtaaagagtgctttaggaaaggtgggagctataatcttatgtttagtagatctctttgcaggtgccttcatgcccaagtcagttccaaactttttggcgcctagtgaaatagtcgtcatttgtatttttgctcttttagtgcttttggtttattcatgcaaaataaagattcaaggggtatatctttctaatgatttgcgaagcaaaatttccaactttaaagtcaacaccccaaacaataaataaattcttaatgcatttgatttagcacatgtttttatttttttctcttgttgaaaactataattaaaaggaatgaaaatatttgcagaaatcgaacctgtgtattatatttgcagtgtcaaagagacaaattttgtcagattagtaaagaaaaacaatgaatttagcgtaaggccaattcaatggttttcataaaagataaagcaaaaaatgtgcagtcactcaaggagttagaataaaccgaagcaaaaggttcgattcctggtggcaccactatcaactcagtaacaaaaatcccttgaacttttgaagttcaagggatttttgttttatctcttttcttattcactctatcggtgtttaagtacacacatagcttccatcagcatacaaccggtcagatgcgatgtcaatcccacactctcatcatcagcaggtgcttttctccaacgaccgctatataacatagtcttctgattcactccttgctctgccataaccgtagcacaatgagttatgtagtcgcgaaacttattataattggcactatccagtgcagggtcattaatcagtttcacaaaataacggaagaagatgccatgaaacaagccaccgtcaccaccttctgcatcggagagtacaccttcattggtcgacaaatggtcaatcacaaaattggccgcttttactgcatctgccagatattgcttatcaccggtaatcttatacagttcatgagctgctcccaggaaagtacccgagttgtacgaaaatacccatttggtaatcttgccttctccattcatgctgtcatacactgcccccgtctgacggtcgaacaagttattcttctcccatgtatatattttaatggcctcattcagataagcctgtttgggttttccggcctttttacccatagcatcgtaaaaattatacaaccgggcagcaataagggcagcaggaccattggaacaagcgttcttagattttgccacatccgtcttccaggtaatgccaccaaaccacggagcctcatcttccggtccccaagtagaccaaacccaatcatcgtaggtctgtctcgcctttttcagatacttggtattcttagtgctttcaaacatgcgaatctgtgccagagcaatccattccatatcgtctacaaacacattccaccacgggtcttcctctctgcccgcaaaattgaatttcggtgcaccttcccaccataacgggtatatattcaaatactgtttgcttccggtacgcatatatgcatctaccatgacatccatagcatgtgcctgtggccaataatgattggtagtcatattggaaagatcactaccataattaaaataaaaccgattctcataccctttgaagtttgcgccccaaaaatgcttgataagggcttgcgacataccatctgccattttctgccaataaacaggcgtcttttccgccagacttgctgtagttttttctacaattacaggattgcttccccctgtctccgcagagagctgcaaagtcaagctgagaaaaaataccgtaatcaataagttcttcatgttttctgcgtttaaaagttaataatatttcagactcagcgggcaaaggtatgaaatagtagagataatgaatcattatttcttgccatttttgtacgatatgctgcattcttcttccggttaccctccgttcccctgtctgcctgcaatactatttttacgcatagaaaatgtaggtgtgtcaaaagtaactaaactctcctccttcgggaaggaggagtacccgtagggggaggtggtaggtgaatatataagctattgatattcaactgtgaagtacacctaccaccccggctttcagccacccctccttcctgaaggaggggaatttagtt

SEQ ID NO: 255 - DNA, 32566 bp, Bacteroides thetaiotaomicron
  source 1..32566: mol_type = genomic DNA
ggtaagataatataagaatgtaagggagatatgctaaggacataagtgtcacaacatacaaatgataggtaaagtaaaatcaatacagctgtagtctgtagcagaaagaatgatgagagacaacttaaaaaaggatgagagatacactgtttgggagcatattatgggataaaacgatgagagacaccctgctccgaaggtatctctcattcattattcatctagttatctgatctttacagaaagacagtgagaccgtgagactaaaatattttttttatttcttgggagcgagcagattattccttatctacagaaaatttaaagatacactgactcatgtatttttctcccgggcgaagcacagccgaaggccattccggtttgttcggagtatccggatacttctgagtttcaagacatacggaagcacgctgattatatgtgatacctttctttcctgtcagagaaccatccagaaagttgccggcatatacctgaacacccggttcgttggtatatacatccagtacgatacccgttttgggagattcgagtgaagcacatttgcgggaaatatcccctttggcattcaatacccagttatggtcataaccatttccattcttcaattgtacaaaatcgtaatcgttaatgcgtgcccctaccggagtcggagtgcggaaatccatcggagtaccttctaccggaacaatctcgccggttgtcatgaatgtgctgtctaccggagtataataatcggcatccaccatcaacaagtggtctgcattgcttgctgcatcaccatcgagattaaaataagagtgattggtcatatttacgatggtcggcttatccgtttctgcttcatagcggatatcaattgcattatcatctgtcagtttcatcaggactttacaggtaatgttacccgggaaaccttcttcgccatccgcagcgacataagtcagttccacttcttgcggattcggttgcacagcgtcaaacacacgatactggaatccattgggaccgccatgcaggcaatgaccgtaattattctgaggcaactgatattcaatgctgtccaatgtgaatcgaccttgattgatacggtttgcgtaacgaccgatgctggcaccaaaatcagaaggtttgctgatataatcctgaatagaatcgaaacctaaaactacatcctgcatcttaccgtctttatcggggaccatcacagaaacaatgcgtccaccaaaattcgtcacacaaacttccatgttgttcttgttacgaagggtgtacagatcggttttcttaccacctacttcagtctggaagttagttcttaacaggccggagtcggttggttgctcggctttcggggtacaagcagctacaaaaagggcagaaacagcccataatgctaaattcttcatggttgatataagtattattataaattagttcaacgaacatcttttatttagattgcaaaattggcgaaattctgatagtttggaggcaacattctttccaaataatagcacaaatcagtcatttcgccaatgatgcaatcataaacacttatatctttctaaatcaaaatgatttatcttataacaaattcaagtaaactgattccatcaccagttactcctttgtattcgggaaagccgatattctcaaccgggccgctcccatcggaatcaatgtaatctcttctttagcgcctttcaccgcatcttcttcgggcaatacaccgcaaagtccagtttcgtcaatctgccattcggggataatccggccggtagctttcacttccaaaggcacattggccaccgtgaacgggaagttatcagcaggccaggacttacgaacgactttgaagttcttcaaaggctctttcttatccaataccaacgaatagttccagggactgttagcatagatttcagtagtaggccacttcttcgggtcagcacctttctgccatttggagtcaccgatagccgtttcacgactgtctttttctatatatttctcgtcaatcttcagagataaagtcaacggaccataatccacacttacactgttcttattgacttgccacgtacgcatggacaaagacatcggaagagtcatttctactttatcaccatccgcccattcgcgttcgatacaaaggtatttaccggatacaggtttcacactgatcttctttccgttgacacgcacttcggctccttcagtccatgaaggaatgcggaggtagaacggaaaatcgaccttttcatcggtagaaacggtgaatttgatgccttcttcaaaaggatagttagtctcttcgtgaaggacgatttcttttccattacccactttgatctttgctttgcaagcagcatagatggcggcagcaataccgttgtcgggagttgccaatatcagatgttccgagaaataaggccagccttgtgcatggttatgctgacagcaacggctgctgaacggattcatggaaaggaacggaccacggttgtcaatacccggatgatggttctttgagtcactgacagtatgattcggacaagtgatgtagcgcaaagccttgaagtccggcatcacagcggcaggataagagttgaaagctacttcttcgcaatgctcagcccacatcgggtcacctgtcatgcagagcatgatttcatcggaagccatctgttccaccaatccgcaggtttccactccctgacgaggatcgatatatcccagacgggcattctcgtcggcaccgaacataccgcccggaacctggccaaaagtacgacggatcaaatgatgtacattataagaggctttgagcatagcggaatctccggtctgcatataataagtggcaggttcgcggaaacactgggcgatgttcacattgtgccagttgggcagggaggttgattttgtccagtcggctgtgttgcggtgaatcttcttggcaaggtccagcaggaaggcatctccggtatgattataaagccaatagatactgatgatgttgtcaccgccacggctgttttcccaatagtcttccagaagcttatcgtcggggacagtcatctgccatttgaagtagttcgtcatcaggtcaataacccgttgatcctgagaatattcataataagattgcagacaccagagcatgatcatctgtgcccacaattcacgtttgccgttccgttcgttgacagggccgaagtatccatcgggctggcaactggcaaatacaccttcaatccatgtttttgtttctgcaatcatcttcgggtcattcaggatataggcaaggttgccataacctttcagccagtaaggtacttcttcccagccatgatcaccaccggttgtcagccaggcgttattatctttctccagccaggcactgatttctcccagatgtccggtcaacccatcgcgttgcagttcgaggtacttctttacccagccttccggctggatgctgccgacaggcagcttaataaagttcaacggactaagcggggcccgatagctcacataattcacattcgtcgattctgtgtaggggcggtccatcacccttacagactcaccggcagtacgtgtggtaaaagctgctgtcagtaacccgacagtcagcagcgtacccgcaacacctattttaaaagatcgtttctgtttcattttgaatatttttttggagatactaccgactttttagtcagccttgttttaattcggtttatttataattataaatcaattctccgccttttatcagttcattgtgagatatacggtagtcagcaatctttttcccgttgaaatggatgcttttgatcggtgcgtctttctttttccgtccttctgtctgaatagtaagtacgtttccattcgtcaaccgcaacagtaccctgtcgaaaagcggagaggtcagatcatagtattcatctcccacaagcagagggtagaaacccattgccccgaacacgtaccaggcgctcatcgtaccgtcatcttcgtccatttcgggactatacccttcgggggcattcttgaatgctttacccagataaggagtcttaaattccgaattgcctccatatttatggatcatcggttcggtcatcagactgcgcactatctgctgggttttctccggtgccccaagtcggttgaacaggtaaggaacatggatatccggttcgtttccctgattataaaggtgatggtcgaagaaataggtaagttgcaaacgaagagagtcctgccctacccattctatcattttatcaatgtattgtggagccgcccatcggtattgccaacgggttccctgatagagtccgttgttcttcatcacttcaaaagcgggagtcacattcataaattcctttttccatgtttcttcaaaaagagagaccgaacgttgccggtattgttcggaatccgccttttcaccgatgatttccgctatccttgccattgcccacaagtcatatgccgattccatcttctggtcgggcgaacgcatgggcagccgctccatttcctgcttcataccagcgtatcctttacggaaatcaaggttggtaattcctttccggtaagcgtccagcaagagaatcacagcatgttccgtacgtactgtcggggtagactcgaatccggtggaccagtctttctttcccgttgcatacagatgaatcagggaagtcgccatatcccgcatcttcgcaggttcggtcagtaccaacaaaggaaatttagtgcggaaggtatcccataacgaccagttactgtaatatcggaagtcttctgagatatacacttttccatccgtacccagataagctccgtccggagaactgacatccgccggactcaggtaagtacgatacagggaagtatagaaaatgaccctgtcatctttcttgcctcctttgacgtcgatagctgacaattgtttttcccactgatcagcggtccgggatttcacttcttcgaagtccatcttttcccaacgggcacattcccagctcgccagttcggaacttaacgcagacagtccgatacggacttccaccgaacgtacctttttgccaaaggtaaggcagacagtcgtctctttctgttcttccaactggaaaggatggctggtatttaaggagaaatagagtttgtagcgtccatgtccgcagacgttctttgcctgtacatagccttcgatgcaagtttccgatatacgtttataatggcaggtagctacgtcttcaaacgtagaggcgaagtctatccaaagggcagcggaaaggcttcggggaaatttatagcgttccaccgccatggcgttggtcgctgtcaattcagttttgataccattggtaaaagctgtcgagtaatatccgggagttgctttctcgcgggactttttaatatgcaattcctgtgaaggagctaccggacgaatgcgcaggtttcctcctccgccgctacatcccactccggaaaggcggttgacagagataccggagactttcgtcactgcataatcataaccggcatggctacgcggatcattatccggacacacacaaaccattccgaaaggagcggcagcgcccggagctacctgtccgttatcaccggaagtaccgataaacaagttgacatactttgtattttgtgcaactgacggtgtcatgatagataatacgactaaaagaagggcataccatctgcttcggttgtttttcatgcttctaaaatagtatctggactgattaaaaagttggtagtatctccaatctcctccttcgggaaggaggagattggagatagcaccgacttcttagtcacccctgggttaactaatgatataacttatctttaattcttgtttacagagaacttaaagatacactgactcatatatttctcgcccggacgaagtactgccgaaggccattccggtttgttcggagtatcgggatacttctgagtttcgagacatacggaagcacgctggttgtaagtgatacctttctttccggtcaacgaaccatccaggaagtttcctgcatatacctgaatacccggttcgttagtatatacatcgagtacgataccagtcagcggtgattcgagagtagcacacttacgggtaatgtcgcccttggtattcaatacccagttatgatcgtaaccgttaccattcttcaactgtacgaaatcgtagtcattgatacgtgcgcctaccggagtcggagtgcggaagtccatcggagttccttcaaccggagcgatctcgcctgtagtcatgaaggtactgtctaccggagtataatagtcagcatcaattgtcagcagatgcgcctcattacgggctgcgtctccgtcaagattgaagtaagagtggttagtcatattcacaatggtcggcttgtcagtttccgcttcgtaacggatatcgatcgcattatcgtctgtcagcttcatcaacactttacaagtgatatttcccgggaaaccttcttcgccatcttctgccatgtaagtcaattccagttcttgcggattcggctgaacggcatcaaacacacggtactggaatccttgcggaccgccatgcaggcagtgaccgtaattattctgaggcaactgatactcagtaccgtccaaagtaaatcgaccttggttgatacggttagcataacggccgatgcttgctccgaagtccgaaggcttgctgacataatcctgaatcgaatcgaagccgagcactacatcacgcatctgtccgtccttgtcgggtaccatcactgaaacgatacgaccaccgaagttcgttacacaaacttccatgttgttcttgttgcgcaaggtatacaaatctgttttctttccatccacttccatctggaagttactttgcaataaaccggaatccgttgttttctcggctttcggtgtacaagctgccattaagagggcggcaactgcccatacacataactttttcatggtattctattaattgatactattcaataaatctactttgccttcgttaaccaacttaagaatcagttctccgaaaagcgtattctgccaggcaaaccaggcacgggtgaagttcttcggatcgtctttgtggaaagattcatgcataaagcctgttccggcatcggtatccatcagcattttgatacaggttttgatttccgcatcatccttgctggtgaaggctttcatcatgatactcatcggccacaccatatcataaccgatatgcggtccgccgataccttcgcctgccttgcctttgaagaagtaaggattgtcttcgctccacacgaatttacgggtattctgatagataggatcgtttacatctacatcacccagataaggcatggcaagcaggctcggtacattggcatcatccatcaggaagtgatttccgaagccgtctacctcaaaagcatagattttaccatatttcgggtggttgtataccgcatatttcttcaatgctgtctctacttcctttgccaggtctttgcattccttagccaaagcagtcttcttatttaccttatcaagtatttcggctgctttgcgcaatgaagatacggcaaagaaattggaaggtaccagatattgaagagtcgtcgcatcatccgaaggacggaagcaggagacgatcagaccaaccggtttcactggtgctccgagtccgtcattattcaatgtatccaatgcacgttctgtcttacgctggaatttatacgggccaactccgtctttgcgctgttgttccttgaatgttttcagcacattggtgatagcctgaatccattcttctgagaagatgctggcatctccggttgttttccagtagtgataagccagacgcagcgggtagcaaagtgaatcgatttcccatttacgctcgtgcagttccggcttcatatcggtcaggtcactcatccagtgattgtcttcaacggcaccgtcattaaatgcgtttgcatacggatcgatattgatacatttgaactggcggaggataacacctgccagcatctctttcagttcgggatcggagtttgccaactgcacatacggccatacctgcgcacccgagtcacgaagccacattgcgtgaatgtcgcccgtataaacgaatgtatccggtttgccatccgcgcctttgcggaagtgtacggtagtatcgatggtattggggaaacagtttgcgaacatccatgccagtttctcgtttttcagaagtttctgcacacggatgatttccttttctaccgcattcgaacggaaaagacgtttggaaacttccggacgattgtctttctgaatagcgtccgtcacacatacatgcattccggacatcgtatttgcagcctgcatctgaccgccacaaaggagcatgcctgccagcatacccgcactgatatattttacttgcttcttcataaattactttttctttttaaattcgttggagaaagaataagggaaatcggtttctttggtaccacgctgctcattgggtttggaatccatcttgaaagtgatggaagcaccgttcataaggtcctcgtgagtcacgtagttctttgtatggtctttgccgttcaaggtcatggaagagatataacgtttgtcgtctccgttatttggagcggagatggttactgtctttccattttcaagatgcagcttcatctgtttgaagtaaggagtaccgagaatatactcatccgtacccggacataccggatagaagcccatagcagagaacacataccacgcagaagtctggccgttgtcctcatcaccacaataaccgtcgggagcaggagtataaagcttatccatcacttcacgaatccagtgctgcgctttccacggctgaccggagtagttgtacatatacagcatatgctggataggctggttaccgtgtgcatagttacccatattcataatctgcatctcacggatttcgtggatgacaccgccataatagctgtcgtcaaagacaggaggcaggataaatacagagtccatcatctggttgaagccgtcttttccgcccatcaggtcgatcaatccctgaggatcatggaatacggaccaggtataatgccagctgtttccttcggtgaaagcgtctccccacttcaacgggttgaacggagactggaatttgccatcctcattcttgccgcgcatcagtttatgttcgggatcatacagattcttatagttcatggctctctttgcaaagatctcaatttcctttttaggcttgttcaaggccttacccagctgatagatacaccagtcattataagcatactccagtgtgcgggctgcattttcattgatgcctacgttgtaaggaacataaccgagcttattgtagtagtcatagcccagacgtccggtagaagaaacctgcggatgtaccgcattagctccgtgctttacagcttcccaaagggtttcgatatcatatcctttcagacctttcaggtaagcatcggcaactactgaagccgaattgttgccaaccatacagcctctgtgtcccgggcttgcccattccggcaggaagccgctttctttgtaggtatttaccaatccttcctgcatcttcatgttcatagacggatacatcaggttcaggaaagggaaaagacaacggaacgtatcccaaaaaccggtatcggtaaacatatagccgggaagtacttcaccattataaggactgtagtgaacgatatctcctttcgcgtctatttcgtagaagcttctggggaaaagtaccgaacgatacaggcaggagtagaaagtacgcaaatggtcgatatcatcatcttccacttcgatgcgtcccaaaacgtcgttccataccttacggccttttgccgcaatctggtctatgttatctttgcccaactctttcaagttcagttccgcctgttcggggctgatgaaagaagaagctacacgtacatttacctgttcgcctttacgggttttaaagccgatcaatgcgccggcatgcttatcgttggcttccagtttattggtatcgatgttaccattggcaacagctgccgtataagtaaaaggcttgtcaaactccagtacgaagtaattcttgaagtttgcaggaacaccgccgctgttcttggtcgtataaccgataatcttgttttccgaagggatgactttcacaaacgaaccgttgtcgaaagcatctacaactacataagagtgatcgttctcagggaaagtgaagcggaatgctgccgctctttctgtcggagcaatctcggttactacatcatggtcggcaaggtatactttgtaatagtaaggagtagccgtttctgctttatgcgagaaccagctggcacgctgatcctgatcgaaaacggctttaccggtaatcggcatgatggagaactgaccgtaatcattgatccaggggctgggctggtgggtttgtttaaaacctctgattttatcggcatcataggtatatgcccagccatcccccatttttccggtctggggaacccaaaagttcattccccagggaagggcgatagcgggataagtgtttccggtagataaggcgtgcttggactgagtacctaccagcggactaacatagtccactggtccggtaatcgttttagcatccatattccacgcactaaataaagtaaaagctaatagagcgagttttttcatggtgttcttgttttatttagttagtttttcttcaagcatctttataaaatagccgccaactacggaacgcgcctggaaacctctctgaatcggattgtccgtaaatacccagtcggacatcggaacgcgggtagtcgtttcatccataaacagatataccggttcaataaacttctcgaaagtagctttgtcctgtgccatggtagctgtccacatgatccagtcagtcttggtataagtttcacggttatccaacggaaggccgtatttattttgcttcgtaagataataagcaatttctgtctcagcaactttttccgggaaaatctgcagtttcagcaatttgtcccataccagattatacttctggctccaggttcccggcttgtcgaatgtcagacggtagtggtcgccgtcatccgccatcttcacccattctgcagccatttctttcgccttcttcgtgtacttttcagcaatgtcttttttgcccagcatatctgccatgtagccgtaagaagcaatacccatgatagccttgatagaaagattggcattgtgcgcaaagtgtccggcaaagtcatccgtacagagttggttctccgggtcaagaccgtactcaaccagataatccgtccaggttgtcagagtttcccaatgcttttgtgcgtagtcggcatttccttctacagcagcaatcgctgcagcaaggactaccatattgccggattcttcgattggcatatcgcctccgtaagtctggccgttagccagcggatatgtacctacgtcgtgagcagcaaacggtttggtccattttccgctttcactataatagaagatatggttcatggtagctttgaccagttccggattgtaaagcagaagcaacggagctcccggataagtcagatcgactgttccgatggaaccattactgaaattctctttggaaaggaataccaggtcaccattcggagcttgtaccagtttatgggcagctaatgcctgacgataagccagagcgcaaagttcggcatacttgcgtccgccggccgcttcagcctccgccatcagtttcttatcgaaagctgcacaatttttcatttgagtcttatattcctgttctgctttctggaattgtgatacgattgtttcactgcctgtacgattccagtaaggacggaggttttcaccaaagtactggatagagtaaatatcatcgtaaccgatcagcaggtgtccgttcgctttctttgtttcacccagtgagcgtactaaagctagtttgtcataaccattggtggtaggagcttccagtttgttctctgtaaagctttggcgaagtttctttccgtcaccgatagcataagtgctgttctctttttcagcagccaggtagaagtgtccccagtcaatacgcacatcgtcacctttctttttcaggatgtcctgattacggctgccggtacgcaggaacaacagatcaccgtcagtaaagctgtcggctacggattcctgatgaggcagatcgagtgcccattgaggagcagcttcaaaatagagttcaacttggtgcgcctgtccgtcgttagaaatgacttcataagaaatatagttgacagggcgtgccatcaagtccagattgtccataaacaggggcgcggtaaatgtcaaattcaagtctaccggaccacaagtgaagttataataagtctgcataggttgaacatcggcagaagtctgctgtgcagtttgattgaagtaacggttattatccaattctaccagcaaaccaaaatccagcaagccattcgctccgcggttgtgacaataagcggcaatcaggttttctccctgtttcagggacgctaccacttcttccgataacttcacctgtacgtgcttcttacaagcgtttcctgtgtctacaacctttattccgttgatatagataatcacatcatcatcatgagaatattccagatatacattcttacctgtcaggtcttcctgaatatcagcaacacggcgtacccagataaattcttcaccccactgggtcttggctacatgttcgttctccatggttccgaaggcaccttcaccttctttccaggcagcatcattgaagccgacattttgccatccgtcggcaggttgctgaattgtatattttcctgtccagttaccttgttccgaagttttcaccagaggtctcaactccagttcctccgttcccataaagcggtaagtctgtccgtcgactttagctacaccgattaaagggaaatctttaccgctccaatgtttgaccgaaccgtcgtataagttgtccgtgaaagaccatgcactggtatacgggtctatgctcaccagcggataagccggagcacgcaactcgctcttcacatgctgttccagctgggtctcacagctacaaaatacagaggctgctcccagcaacagcgtcatcagttgttgtttcataatttaattacctgttttatttaatctatttaccattctattgacacattcacaccggaaggatcgttctcaaaactcaacagaagagtttttgatgattcatcccattccggttgttcctcttttccattcacacgtattttctctggtttacgaggcaagaggactcttgatacattggttgtatttatcgggcttttggctacaaaagagtaactttgtttgctgactttctcatcatagatacgagaagctccgcagagcactttggcttttattttaccggatactttattcagatcataaagatacccctgttcacccggttggatttgtttggaagtcagtaccggcaggtctttgtcaaacaggtcgatatataatccggataacgtcagtggctctttggaaacgctttcgtccatgacagcagcaatggtatatggaccacgttctacaatgaagctgttcttggtttctatctctttgccaatctttttctgataagcggatgcgatcgtttcaaaatatttctgatcgtttccggctttcaaaacaaaatgtttggggtcttcacgcatcacaatcaccgttcctttaccatagcggtaagttccttcacccgggttacgagatagattcatcttctcgaacaggtgttccgaaggcgctttatattcatttccatctgtattccaccattccagtaccgtttgataagggtcgatatcttctccacaatagataagtattccgcccttcttcacccaatcagccaaatagttgtgatattccggtttcatcggtttcatgtttgaataagacatgacaagtatgtggagtcctttgaaagtttctttgaaaggggtattttccatgtgtaccagctctaccggaataccacgcttcaacagaggcaaagtttgtccgtagaaactggaaaattgcggatcatcgtaaccgttatgattcggaaaacgttgaaacatcagtgagtttgccatcagtacaccgatgccctgtgtacctgtaatctttttatcggaagtacggatatcattcagtgtattaaccattgtctgcatctgggtggaataagagcggggaatgcgttctttctgatccgttcccgctatccggtacagtccctgatagatacggtccggccagggcattacttcgtaggtatctaccataggatacatcaactgtgctgcaaaagtggcctgataattgattttatagtccagccagtctttcgcacggtcttcgatcgggtctgtcaggaaatacattttccggttcagcggtgcagtcatcgacttcatacacccgtattccagaaacgcattctcgaatacacgttctttctgcacgccgttatagaaattcggttcgcgggcagtccctgtccatacctgggcaatgtagccgtctacacaatccaatgaagccaggctggcttccggacttacaatctgccaggaagtataattaatcaaagaatgcgtcggcacataacatttgatatccagtcctttcgattttccgtattctttggcataagtgaatatcttatccagcgcattatagtacagatgatatttcagtttgttggaaaggtatgtgttttcgggagattcgtgctgagctctccaggggaaattataatatttctgccattcggatttaaaagcttcgctatatccgccacgcatccagaactccggttcttccagatatatggatgttatcccagcgtcaatcacccgtttgatctgtgtttcctgcatatagcggataaaactttcggtaggtacgatataagggatcagatgaccatgagctatttcatttccattacggtcgcgctgtccttctttcagatgcccgtctactccatcccatttccccagaaagtagtccttgtagtctccccaggcaactccggtcataaattccgtcagataacctttgtctctccatgactgaatgcgttgttcaaaagttactccgggcttatccagtgtaccatataccatcgtggcatcagcacgtacgtctgtttcgggtttccagggttcagaagtctgaaacgtggtctttgcttctttgctttttcctttctgcgcataagtagcatgattgcaggcaaaaagcaagccgagagcaatcagtaaatgtttattgttcatgatattcaggtgtattttcatttttatatctggtcgttgccccgtttctcttcggattatttttctgccggaaacagaagcatcaatgccggtataccggaagccgagtagctgtctatctcagcaccggccggtaatgctttctcatattctccgccacatacattacgtgtcttatccctgtttgcccaaccggattcgatattacgtttcaggaacgggatatattgtgtttgtccgcagtcgtataccagcatagctatgtattctgcaaaaatagccgtatagataccttgctcgattcctctttcaaagggcagcaggttatgcttcgcagacatttcattgactgtatagtctgctgcaaggattgcattatccaggtagcttttttctttagtcgccttgtaaagcaatacggaagcaccgataaaggtagcttgattatatacatgcgctttccaggctggattaccattgccatgacgactatcagctatccgtcccgtcttcttgtccaacaggttttctactccccattcataaatctctttacctttagccaaatactgttctcttgtctgatacttgggtgattcttcggttgattcttttctcttcttcggaacattattgtacagtgtaagtgctgctaccacggtagggaaattgatacaagccatctttccgtcccccggtctgttcggcttgggattatggatcggctgccattgccagaacatccctccgttctctttgtcatatgatcctgtatcgcctacttttttagaaccgtaccatacacggctgaagctctcttcagacagtttcagatattcatccacaccaaacagttcgtatgcacgtgccaaagagatcgtccaccacatgatatcatcatagataaaccatccggtattttcattattattatcgaaatcaaagtgacaatattgggttttatttccagcgaatatcttttcgcagagctctttgtaataggctcttttctttttatctttctgagccttcgccagtttataggcgttcattgacatatcccagtaaataggctggcaccagatagccgctgcgccatgaccacggtctaccgcctgttcataggatgaagttgtcttatagatatatttatccgggtcgagcagcgtattattaaatccttcgtatgccgcccatacatcttcattggtgtaagaccctgtcttctggttcgttttttctgagctatcagccgcccatacagtagtagttgatatcgccagcagtaaagctaccgccaaaagaattttgcttttcatgatagttgataagttttaatatttttcctgttacaaagattgcagaaatagacgaaaaagaacgataatctctattcaataaagaacaaatacagaccaaaacgcccttttaaagtatcagataacagcgtatatatataaattccccttacccggcgtaccggataaggggaatttatatacaatatctccgtatattttagattatcattctgatcagaattttggagcgacagcctccaaagaaggttcagcgcctttcacaaatggccagccacctttccactgtacacgatccatcatcaatacacgaccctcgggattagcaacacttaccgcatgatagaacatccaatcgtttcctttcttatctgtcactagttctgaattatgccccggaccgacaaatgctttattcttctgaatcaatatctcatgatgattatccgacattgaacgccctttcttgtcaacataagggccgaacagatttttcgaacgccccacgactgtagtatatgtgctcttcaagccttcacagcaacgaccgatggaagcaaacaaataataatagccaccccgtttatgaatatacgtaccttcataagcagtaccggctatttgctctattggagcacctttcttcaaagagagaccatcttctgtcagttccgtaccatatattccgtggaagctcccccaaaaaaggtatttctttccattatcttcaatataaaaaggatcaatgcaattctgtatattgatttcattgctccggaataacttacccaaatcagtaaatggtccttccggcttatcagcagtagcaataccaataccacatgtccactcacctccccaagtggacatagaataatacattacgtatttatcaccgattttattaatatccggtgcccatattctccctttaggttcgaagtttggacgggtagcatctgtaaaagcagtacctacataataccagtttaccaagtctcttgatcgatgaataggtacatttttaatactttcagttgcgtatagatagtaatattcatcgtctccttttataatagtaggatcgggcaaactaaagtttattacaggattagcatatgttttagcgcgaacaagtgttgccaaagggctagctcctactccttcaaaagtcatacggacaggctctatttttccgtctttattaaaatacatacggtctatacaagttgcacgactgttcgctgcagtttcgcccaacggacgacggtgataaatgatataccattcatctgctccgggacctttaactaccgaatgatgaccagcaccggttgctatattagtatcttgctgcagaatttttccgactctttcaaacggaccgaacggtgaatccgcaatggcataggctacactataatccggacctccccagccaccttccgaccacataaaataatattttccattatgtttcagcataaacggcccttccacataattttggggagtcacttccttatagatagtaccatcctcaaaaggtacaatactcaataaatccggtgccatcttcaccatattacaatgtccccaaccaccataatacatataatattgtccatcatcatccttaaatacaaactgatcaatcggctgagcaccatttacaatcttatcaatcaacggttttcccaacgcatctttaaaaggtcctgcaggattgtctgctacagcaactccaattccgcctaactcattattattttggatatcattggctccgaagaagaaataatatttatcattagcatggattactgccggggcccacaatgcacgtctgagccagctgatattttctttggaaagtactttcggatgcttggtccagtttaccaaatcttttgatgagaaagcatccatgaatatctgatcatcataagcggcagaataggtaggataaatccagtattcatctccaaacacaatcccttccggatcggcataccaaccagggaaaataggattaccactcgttttcggaagcttacttttgttttgggcagatatagatacagaacagcaaattacacagaaaagaaaaagatgtctaagtttcatatattatttatttaaaagttcacttcgcaaagatgagaaaaaacaaagaaaagttttagaaattacagttcatttaacaacaaaaactgaccattctacttccatttgcatgatttatcaatattttatgcttactttgcattgtcattatcaaatgagaagtaccatgagaagcagattgtttttattatccattatcttattaatcggtgtctcttgccagcataagaaggctacaacagagaaagaaactgtagccgcaggaaatacctatacgaacccgttacttgaacgtggagcagagccatgggctatttttcatgaaggcaaatattattatacacagggctcagaaaacagagtcatactttgggaaaccgatgatataacagacctctcacatgctactcaaaaagatgtatggatacccaccgaccccagcaactcctatcatctgtgggcacccgaaattcatcgtataaataacaaatggtatatttactttgccgcagacgacggcaatatggataatcaccagatttatgttgtcgagaatgaagccgccaaccccatggaaggaacatttgtgatgaaaggacgcatacagacagataaagacaacaactgggcaatccatgccagcacctttgaacatgatggccaacgctatatgatatggtgcggctggcaaaaacgaaggatagacagtgaaacccaatgtatctacatcgctactatggagaatccatggacactgtcttctgacaggattctcatctccaaacctgaatatgaatgggaatgccaatgggtaaatccggatggcagcaaaacagcctatccgatacatgtaaacgaagcaccccaatattttgaatcaaagaataaagacaaagcatgcatcttctattcagccagtggtagctggactccttattattgtgtcggattactgactgcagacgcaaaagctaacttactcaatccggcttcctggaagaagtctccggttccggtactacaacaagaccctgaaaacaatgtatacggtcccggcggaatatctttcactccgtctccggatgggaaagaatggtatatgctatatcatgcccgccagataccgaatgacgctcctggcgcatccgattcccgttctccccgtttacagaagatagactgggacaaagacggaatgcccgtgctgggaacccctcaaaaagaagaggaaccaatggcaaggccatccggttcccctattcataaaaaacagaactaattacagattgtactctgagggccgagataagaacgcttcattcctcccaagtcaatgacaatcttttgaataacgacgcccggatcaccacagcgtatctgcaaagtgtgcttaccgggcttctttacatacaaagtagacttattcactctgcaattcttcaatacgctatcataccagatttgagaatattcgatagctgaagtagaaggagtagaaatggaaccatcatctatacggacactatactttgtatccgagttagtatgttccggcaatttgtagtcccgctcagcatgcaagggaaatgtcggcaaaacatacgtatatacatcataaatcccggcattaaatgtatagaaatcatattccaccctggggacatcacctgcacgatacatttgcaagggagctgtcggattccccaactgcaaagagcgaccctcaaaaccaagtcccggaaggatactcatccgaatatcattactctcaaacttccggtggaagtcggctgccggaatagaaatgtaaccattctcctctacatacaatccttgtacttctgtacgtgcaggagactccggattgaatactgaaaccagtacactctccttctgactgccggaagttacatcaatttgtcctttcaccttttctcctgccggcaccttatcccagtcaacagaaatatagatacggttttccgcagacgtcttaccacttttctgagagatcagtatccagtcttccgaaggcgtgatactccagcttagctctccggtcccctgattatatatatctatccaatgacttttacgtgaataagtgctgtaggcgggcaatgtatgaaaactcattcctcctttatccaaattttcgctttctgcctgaagccccagcttaggaaagccaacaggtgtgtattcctcttccatcaatgggatcatgaaataggaactcgtaccatcatagttctgttttaaagacatcatgtgcttccattttccatccagcagagagttgtatccatcggttatgatttcgagactatcatgatagcacttcacctgagccttaagccgattggcggcagcacgttgctgacggacatactgacggtaaaactgtcctttgatggtcatatgattcatcagttcggcccctttcaccggatagtataataattgatagaaagccggtttactcttttcgtccaatgaagctaacaaatcctccgtttttttcccaatacggctatactcagtcaagcgtctttccgcttcattatagttagcaaaagagaactccgtatccgtacgtttctctccgcctccccaatagttattccaatatccccagcccatgtactccggctttctggaaaaagccaaatttatatgagaacaagttatatcttccaatgtatcgtagtactcctcaccaaacatctttgccagccaacgtgccggataagtggcgacattatccgcgttgaagctgtctatatcataagccatatcaaggaaaagggagatttgtgtttcagcccctttcaagtctccgcaattcgccagccagacacgatcggcagtggtatcatacgccttacgaagttcttcatacatcaatgccggaggggtagtactataccacaaatagctatgaggaacacccaaataagatatatgatagtaaacgcctgcacgtccggagcgcttttgctcctgcggaccactcagacgtttcatataaccgaaattatcatccgcccagataattgtaacatcatccggcaattccagtccgttcgaatagatttccagcacttccttataaggcgtaaatgcttgtggaattgtttcaacaggtttgtcaatatgccgggcaatgatctctctctgagcattcagtgcactttccagcatcttaaccttttcccgcatcggcacatctccgccacccatagctgcatcatgcaagcctcttaaagccagcgtatatacattttcatacgcacagttttccttcacacgattactcaatacctcgttgatcttatctttgttcttgttataatcccatggtcccatcgtcttgctgtcccattcgctggcagtgttcagcaataacggttcgcagtgactggaccccataacaatggcaaaggtatcagctaccagtttattttccggtatcttataaaatgcggtagaaacggggtgcatggccggtgccagatgattagctttcagtcgcagcaacagttcgcatattttggcataggtacgagggccgatatttcctctttctttctcgaatgtcttggcagcccaaggtttcagtccccagtcttcgtcatttaagaaaatccccctgtacctcaccgaaggagtcttggacaaagtggcgggggcatcgacataaagcgtcttatgtttcttcaccggaacatcagcccaccagtaccaaggagacactcccatcatttccgaaagcgaaaaaagtccgtacgcagctccccgcctgtcgctccccgctactaccagcgctttgctgactccggggaatggacgggaaaccgtctgaatcagaaatcgttcccatgccccttccaaagaagagatatctagcttgcccttctcagctaactggcggatcagccgatttttctcaactgtacccacaataataatctctttgtcgcctttcagtttgtccgtcaaccgtaattgttgtccggtcactgattcgacgtccgaaacaaaaagctccgcagtcttacgtaccaccaaatagtcatcagtatcataaactactacagctttcgctttcgaagtaaccaagggaaaagcatacttactctgaatagcattctctttaatgactacctgcgactgtagggcagaagtaaccgacaatactactaataaaaaaagaattctcattgataaagtttattatagttgtttttcagtttatttacgactatccgcggaaacatacgattgttctccctccaaaagtcataattatctccggtaatataagctacttattattcaattaaggacaaaaaataaccattatcgcataaaaaactgtcattcactataaaatgacgagcatttatcatttattgaacagcaaatttcctttattcttctctgattggcttttctttgcaatattccttttatgaatattaattcttctatttaatacatataaagataattaccatgaaaaagaattttctagcagtgctattcgcattggctctttgtagcccgacattcgctcaatggaagcccgccggtgataagataaagactccgtggggtgagcagttgaatcctaaaaacgtattaccggaatacccacgccccattatggaacgccaggattggaagaatctgaatggtagctggaattatgcgattactaaaaaaggagaaccggcaccaaacaattaccaaggagagattttagtaccttttgcagtcgaatcttccctgtcaggagtaggtaaaaccattaacgagcatcaggaattatggtatcagcgtacttttgatgtaccgtcagcatggaaaggcaaacaaatattactgcacttcggagctgtggactggaaagccgatgtatgggtaaatgacgtaaaagtaggacaacatacaggaggcttcactccattctactttgatattacttccgcattgaataaaggcaataaccagttggttgtgaaagtgtgggacccctctgaccgtggcgaacagccgagaggaaaacaagtagaaagaccggaaggtatctggtatacaccagtcacaggtatctggcagactgtatggctggaaccggtagctgcccagtatatcgcccaactgaaaacaactccggatatcgacaagaagactgtcaaagtggaagtagccaccaacgtatgctctccagacaaagtggaagtgaaagtattcgacggcaaaaacctcgtagccaaaggagcagcgctcaatggcgtaccggtagaattaacaatgccggaagacgttaaattatggacacccgagtctccttcactttataatatggaagtcactctttataaagacggcaaagctgtagaccaagtgaagagttacaccgctctccgcaaattctcaactcataaagacaagaatggtattacacgcctgcaactcaacaacaaagactatttccagtttggtccgctcgaccagggttggtggccggacggcttatacacagcgccaacagacgaagcattggtatatgacttgaagaagatcaaagatttcggctacaacatggtgcgcaagcacgtaaaagtagaaccggcacgctggtatacttattgcgaccaactcggactgatcgtatggcaagatatgccgaacggaggtcgcggtcctgccgaatggcagatgcacaagtactatgacggcgcagacgccatccgctccgcagcatcagaagctaactatcgcaaagaatggaaagaaattatcgactacctgtattcttatccgagcatcggcgtatgggtacctttcaacgaagcatggggacaattcaagactcctgaaatcactaaatggacgaaagaatacgaccccagccgtctggtaaaccctgccagtggaggtaaccactacacgtgcggagatattctcgaccttcataactatcccggaccgaacctctatctctacgatccgatacgcgctaccgtactgggcgaatatggcggtataggtatggcactgaaaggacatctgtggctggcagacaagaactggggctacgtgaagttcaacacgccggaagaagtgactaatgaatacataaaatatgcagaccatttattggaattgatcgagaaaggcttctcggctgccgtatacacacaaatcacagatgtggaagaagaagtgaacggtctggttacttacgaccggaaagttattaaagtagacgagcctaaaatcaaagccatcaaccagaaaatttgtaactcgctaaataaataaaagtttcatattaatgaataaactattctctacaatcatgtcagtttgcctcgcatgcaatgtgcaggcaactgacctgtttaaaacgagtcaggatatcgctttgcgtgcaccgtccgtacctctgatcacttccgatacttatcttgctatctggtctccctacaacgaactgaacgaagggaacaccgaacactggacagccgccacccatcctttactgggcgcgctccgggtggacgggaaagtatatcgtttcatgggcaaggacaagctaaacctcgaaacaatccttccgatgacaaacaccgaacgttgggaagcaaagttcaccatgagccaaccggcggccaactggatacagccccagttcgatgattccggatggaccaagggcaaagccgctttcggcaccaaagacatgaaacgcatcggcacagagtggaacaccgaagacatctgggtacgccgtagtttcaacctcgatcaagacctgacaaacgacattatctacttacgttattcacacgacgatgtattcgaactctatctgaacggagaaaaactggtggcaaccgattattcctggaatgacgatgttaccatcgaactatccgcatcagctaaagccaagctccgtaaaggaacaaacattattgcagcacactgtcacaacacaaccggcggagcatacgttgatttcggactgttccgtgaaaacaaacagctcagcaacttcaaggaagctgctatccagaagtctgtcgatgtattaccgacacagacctactatacattcacctgcggtccggtagaactggacctcgtattcacagcacctctgctgatggaagatcttgatcttatctcgactcccatcaactacatctcctatcgggtacgttcactcgacaagaaacaacatgatgtgcaagtgtatatcgaaacaaccccgcaacttgccgtacacgaaccgtcacaaccaaccatctcagaaaagatcagcaaaaacggaatggattacctcaaggcaggtaccatcgaccagccttacgtaaaacgtaaaggagacggtgtacgcatcgactggggatatgcttatctgggaagcaacagcgcacccaacaaggacttaagcataggtaactactatgacatgaagcaagccttcatcaccaacggcaaactattgcccaactcccaggatttcattacccgtagcgaaagcgacatgcccgctatggcttataccgaaaacttaggcaaggtagacaatcaagggaaaagcggatatgtgatgttaggctacgacgatatctactctatcgaatatttctacgaacgccgcatggcatactggaaacacaacggtcaagtcagcatctttgatgctttcgaacgtgcgcaggcttcttatccctcattgatggaacgttgccgtgccttcgaccagcaactgatggctgatgcggaaaaagccggaggcaggaaatatgccaaattactcgcattgacttaccgccactccattaccgcccataaactccttaccgacaaggaaggcaacctgcttttcttatccaaagagaaccatagtaacggctgtatcaacacagtagacttgacttacccatccgctccgctataccttatttacaatacggaactgatgaagggaatgctcaactctatcttctattacagcgaaagcggacgctggaacaagccttaccccgctcatgacttaggaacttatccgatagccaacgggcagctttatggtgaagatatgcctatcgaagaagccggaaacatgattctggtaactacagccatctctatgatggaaggcaatgccaactatgcttccaaatactgggaaacattatcaacctgggcaaactatctgattgagaacggtctggaccctgaaaaccagctttgtacggacgactttgccggacatctggcacacaacgccaatctttccgccaaagcgatcatggcaatcgccggatacggagaaatggcacgtatgctgggcaaagaaacaaccgcgaacaaatacatcgaaaccgccaaaagactggcgatagaatgggagaagatggcatttgacggcgatcactacaaactggcatttgacaaaccgggaacgtggagtcagaaatacaatctgatatgggacaaagtgtttaacatgaacattttcccgcagaaagtattcgatacggaaattcctttctatctgaccaagcaaaataaatatggtttgctattggattcccgggcacaatataccaaatccgactgggtactatggagcgcctgtatgtctccggacgatgctacgttccagaagttcatcgacccgatctatacttatgcgaacgaaacaacttcccgtgtgcctatcagcgactggcatgatacgaatacaggaaagatgatgaacttcaaggcacgttccgtagtgggtggctactacatgaagctactgatggagaaaatcaaagaacagaaataaaacgaatactcttttcctcgttgaatacagacaaacagcccttttgcctagcgtaaaagatgctgtttgtcttttttcataccacttaatgatgcgatcagttttccggagttatatcatcaatctgatattgtccgtcaacgttaaccactctgaccgggatactcacggcacgttcaaactggctgcctttagccgaagtatagttaacctcataccaattatcattcagatgtttcaccgacaatgttttcatgtcattttcacctaaatcttgcgcacgaatgatcggatcggcatctgtcacctctatcagcctatcaactttctctatcaactccttggtcagaaacttttgcttaattgaatccccaagtgcgagagcttctttaccggtggacatgaaactggcagcataagcctcataaaagtcttcaatcatgccgatggcttcttgttcgattctactgctgtccgacacattcgcctgtacgtcagctggttctgccgatgtatccatattcttccggctctgattggaacaggaaagaagaagcattacggactgcaataataacaaatgtacaattctcaatttcataacattaatggttcttgttttaaactaataatcagatttccaaactaatcagcctcccccttcagaatctcttcagttttatcctgactggtataaaaatctatatttgcaaaataacacaaatatttccagaaataaagcgtcaggaacattcgcacatcacgatctgttttaaaatcactgcaaaaatgatccgtgttcctggctatttcctcaaatatcataaccgaagaaactcctcctgtcgcattttccgctttgacatacgctttcaaggccggatgaatggccggttccaattctctttgccaatatgtgaagccatccaaccgtttcttaaacggcaaaattatagactcaacctgagccttcatatacgcatattgtagtgaatcggcaacaaggctaagagagccaccatactcctgctgattcttggatgcttgttgataagcatcagactgacgatattctgacggagaaacaccatccggaacaaacagcgtgcaagaatcattcagaatagctccatcaacaaaataggaatgaagtaaaccacccgcaatccctatgttttcatttaccacctagcatctcatgaattacatcctctcttttattgctaagttcatctatcaactttttcgtgtgttgtcttattgctggactgaagatttggggatactccttttcgatttcatccaaagaataatttttgttatccctcaaaaagagtacgaatacataattcatcaggtctgcttcagttggtttctccttcaagcgtttttcgaaaagagaggcagcttgtttgtaagcatccatagccaggctctttttagcattctcttccagcatcattcccttacctaaaatatagtaaggatcatccggagagaatttctccatttgcaacatggtttgcagtgctttctccttctgtcccaacgccattaagtatttaatcttatttgcatatgccagtttgtatgaaggctccaaagctatcgcctcatctgaaagatgaatagccttatttaaagaatcggaatcattaaagaaacccgcagttttcacagattggttattcttctcaactgctttgggagaaatctgagctatcgcaaaactcgtgttcgtgcataaaagcaaaataataagtgttctcataattctatttattatcattgattagattttgtttaatgtgatacacaaagaacgacaaaaaacaatagaaacacgaacattttctattcaaaaaatgataaaatctattcaacaataaaaataaggcagcctttctcattcagtacaaacgaattttgataaaaagaattatcaacatgaaacagcaatccgattagtatttatagagtaatgaacagtttctttcttagattgaacgttttttttccttctttattcatcgaaaccgctatctttgtagtagttcacatgatactaaaatagcacagagaaagtgctgaacataaaaatcatacaataaaatagacaactaaaaatagacagcactaatatgaaaaacaaaccgttattatttttactctcagtatgcggacttttagcaatatctgcacgtggagaaaatccacccgctaaagtgatattcgaacagtacatgaatcaagctcaaacttttgccgataactatccgcgtgaaaaagcatatctgcattttgataatacaagctattatgtgggcgacacgatatggttcaaagcatatgtcactcttgccgaaaaacaagttttcagttcaatcagccgtcctttgtatgtggaactggtagatcaggcagggcacgttactgataaacagatcattaaactatcacaaggagaaggcaacgggcagtttgtactcccccagtcaatgctatccggttattacgaagtacgtgcttacacccgctggatgcttgcattcagtgatccgcagtacttttcacgtactttccctgtctatcagctttctcatagcgaccagttggagcgtagtatcagcacctatgagttgagtccgtctatggagaaaaggccggaagaaacaagagagaagctgagtctgcgtttctttccggaaggaggacagttagtcgaaggggtaacttcgcaggttgctttcaaagcagaaagcaaaaatgaaggaaatattcaattatcaggcacactttataccaaagaagggcaagaaatcacgtcttttgaaactttacacgatggaatgggagcttttgagtatacaccttctgctctgccggcaatcgctaaagtaaactttcaaggaaaacagtatgaatttaccctccctaaagcactgccaagcgggtatattctgaaagtaggcaataatgcaggggctatttctgtgacggtatcatgtaatgcagcgaccccgcaggatacattagccgtttttataagccatcagggacgtccccatgcctatcagcttatccactgtcaggcaaataagcctcagcaatttacagtattgtcgcgcaagttaccggcaggagtcttacaaatcagtctgctcaatcgtgccggaaatactttatgcgaccgctttatctttgcttctccacgggctcctttacaaatctcgcccaaaggtttaaaagagatttacgctccttatgctcccatccgctgcgaactgcagttgaacaacgccataggagaaccgatacccggcaaattatcagtcagtatccgtgacgccgtccgctctgattatatggaatatgataacaatatcttcaccgaccttctacttacatcggacttgaaaggctacattcatcaacccggctactacttcacagagagttctctccggaaacagaaggaactggatatactgttaatggtacacggatggcgtaaatatgatatgacacaacagatcggtatcagcccattcaccccacttcagttgccagaaagccaactggtactttatggacaagtcaaatctacgattctcaaaaacaagctgaaggatatagctctcagcgtaatggtgaagagagatgcagagattattaccggtcagaccgttacggatgagaacggacatttcagcattccgctggaagatttcgagggatcaatggaagctgtgatccagactcgcaaagtgggaaaagaacgaaataaggacgcttctattctcatcgaccggcatttctcgcctgctacgcgtgcttacggttacagagagttgcacccggagtggagcaacattgcccactggcaacaggaagctgaaaaattcgactctttatatatggattccatccgtcgggtagacgggctttatcttttggacgaagttgaaatcaaaagtaagcggcgccgtcaaagtacgaatatggcgactaaaattaatgagcaaagtattgatgcctactatgatatacgccaggctgtcgatcagcttcgcgataatggcaaagttatcaccactatcccggaagtgatggaaaaattaaatccactcttttactgggaccgttccaatgataactgtacttaccgccagaaaccgatctgttatattatggataacaaaattctatcgtcaacagaagtaaacatgatgctgactgaaatagacggtttggcttctattatcatcagtaaaggcacaggaggagtagatgatgaaattatccagaataccaaaatgtctaattccaatgatgtagatgtatcggaactggacaaatatagtattttctacctcattccattgcccaaacatgatgttctgaataaacacgagactgcagctcttggtacccggcagactgttatgcagggatatacaccggcattagagtattattctcctgcttatatagataaagaattatacatagataaagcagacaaaagacgaactctttactggaatccgactgtgcagacggatgagaatggtaaggcagtgatcgaatgttacaataatcagtattccacgccattgattattcaagctgagacactgagttatgacgggaagctagggagcgtgacgtattctacagttgcagaaacgaaatagtatgctttaggatatttgacaataaacggcacacaatcaatcctaaaataacttttcaaa

SEQ ID NO: 256 - DNA, 8943 bp, Bacteroides thetaiotaomicron; identical to SEQ ID NO: 4
  source 1..8943: mol_type = genomic DNA

SEQ ID NO: 257 - DNA, 5513 bp, Bacteroides thetaiotaomicron
  source 1..5513: mol_type = genomic DNA
tgtgtatatatagcaagaagtgtccttgtcggacattcttgcctttatcgctttgctcaaaaggattttaagattacctttgcgacatggaagtaaatcgaacagaaaagataacattccgctgcactgcacttgaaaaggcggcacttgcggaacaggcagcccgatgcggtatcagcacatcggagtactgccgtacactcgcactgggcggacgacccaaagagaggtacacggaagaagaaagggaactgtttcgggagatagcccgactgaaaggaacactccagcgtctgaataactacttcggtgggcgccagtacagggaagtgttcgaggagaaccaggcactaatcaatgaacttaaaaagatactttcacgatgatagcaaaaggaaagagcatatctcatggcacggcagcactggagtacgaccttgccaaagagataaacggggaggcagcagccaccgagatacaccgccatgagcttttcggctgtacaggtgaagagatggtgcaggagatgaaaccttactttgttgattttccgaaggtaaagaacaactgccttcggtttgaggtcagcccttcagtggaagaaagtgcaggcatgaccgatgcggactgggtgaagctcggcaacgacttcatgcagcgcatgggcttgatgaaccatcagtacatcatcgtgaagcacagcggaacggagaagaacagcagacaagcccacctgcatatactggcaaaccgtgtgtcgttatcgggagaactctacaaagacaactggatagggaagagagcaacggaagccgccaacagtatagccagagagcggaacttggtacagtcaaaggacataggcaaagccaacagggaagagataaaacaggctatggacggtgtccttgcaaggatgcagggatttgaccttgccggattcagccgggaactcgaaaaactgggcttcagggtaagggaagcccgtgcaagtaccggcaaacttaacggctactatgtaacgagccggagcggaacggaatacaaggcaagcgagatagggaaaggctatacgcttgcccacatcgagaagacacagaaaaaattgaagtataactcaatcagcaggaattatggaaacaccctcaaacccaaagacggaggattacacctataagcagggacagtacagcccccgaaagagaaaggacacaacgcccaaagtaaatccgcagcttgcggtagaacttgtgtttcaagaattgaagcgcgtagaagcctatacgaagcgcatagaggacgcaacagccaaaaaggtagaaatagacagggaaagccttgaaagtgccgaaaatcgcctaaaaaacgtattggcggactttgaacggcagggaaacagaatgaaaaacggcagctatgtggacaagaacgcttctatgtattcaatcctttgtgctgttttctccctattgttcgcctgtctgatgtgttacctatgggtggatgcagccaaggacagggacaactacaagaggtattatgaatattatcagcaggaacaaacagaaaagcaagaatgaaatttcattcttgcttttctgtgcttatattaattattcttaggtaatgttccatatttccatttaatagctgaacatggaagaaatgcccctgctttttgaaatgtaccatcaacttttatttcaccagaagcaatgtggattccaacggctcttttagtatttgggctgaatatcaaacctccactatctccatcttgtgatttatatgttgcaactgcaaattcggtaaaagttcttcctgataatttcgttttttctacaataattttgcctggaccagaatgataaaatcctttaagggctatcatattgtctttctttacattgtcataggttccgtccacaatttgaatagttgtattgttatacttgaaaatattggatgagctaactttatcaacaagagtgcatacagccaaatcatgtcctgtaacatcgcactcgatacactctcctaactttgttgttaaatcttgagtatctataatcttattaccaacagccttgactgtatgccctgcggttacaatacacggttttgttttgtaaacacatcgatagcctacgcttcctccaccttgggcacaataaaaatccgcacctggtatcatgggggttggggttatagctaaagaactggtttgtttattgctttctaaagaggtgtttccttcagaaaaagaaagttgccaaaattttattagcggtgaattaattacttcatttttgaaattattgatgtttgcttcggaagcatcttctaacataacaacgacctttccgtctttaggatctatgccgcaagcagaaatacccaattttttccatactccaatttcatctttgctattaataaaatctctaacttgcaaaagttcattcattgtattaacgccctcttctataatgaatagatggcttttacatctttgttcaaggtcttttttataatcttttatatttgtgccttttacttttatgaccaagataccatctttaaaatagctgccacaataataatcagggtaagaaacttgctcaccttctgctcttgcttttacttcaaaagatgattctaaattattaataatatcatttgtattattctctacaggttgattttcttcattcgttggagaatttaaatcagtatccgaacaagaattaagtccaaatccaagaaataaaaatgcacttaaaaataaaatctttttcataagctcttagtttaaagttatcagccataaaattagaaaataattggtctcgttgttctctgaaacaggattttaactatatttctttgagttttctcttgatagcgccaataacatatcctttagggttttctgccagccgtgcgcctttcttcaattctcccaagaatcccataaaatcggggatgcggttctgcccttcaataagggttttcttgttcttgttgatttcatcagacttgaaggcaaaggagaatttaaggtagtcatatacgttgttttctaactggagccgtgccgtaactttagccattcgtgcttgctcctgtagtgcagggtcttctctatcttcaaagaaaacagggaacagagtccatccaataaccttcttcccttccttttcctccttagccacaaacgaataaggagagaacttgtcaagttctttttttgcgacatcaataacctttctgcgaaagtcgtttaccctttcatatttcccttgtagattgaatctttcccgaagcccgtcagaaccttctaacggcacaaacaaaggtgtagtttgtcctgacatgagttcataaaatcgcatggcataaacacttttgaatttcatagcggttacaagttcatattttttaaaacccttagtgaaatcaagagctgctctccaaacaggctcatagacatggaaagtggcaacgcctgtgcctttctttattttggggtgctctattatggctgtatagaaccaaatctcatcatcttcatactccgcccccttttttgaaagtgaggtaaatgcagcctttgctttggtatagttgttgtctgtttcatctcgaagtatatccgccacaggcatagtgatatttacaccgcagtctgtcggctcgattttgtgcatatggtctttgattttaataccttccaaccatcgttgggcaaattcgataagacgatatatgatacgcttttcgtaaggactgaaatcgtatttggcacatgtccatatataggactggaatacggctttgtttggtaggttttcgctcataggacttgcttttttagattgttgcgtatgggtcaagctccttaatacgcctacacaaataatcgaagcgtttcttagtaagcggtgtaagtgtatagaggttctcgccatcaaaattctctccaaagataatgtcgtccacccctatgccgtgattataattctcacgcacgcaatcacgcagaatccaaaggttgcgcaggttcacccagtctgccgttttattcttgattctgctgaacagcacagcagctgtgtagaggtagtgtccgcaatggttgtagtcatgcagtaccagtttcccttgatagtatatgtcgaagtctttgctttcctcatcttcctttgtatcgcagtagaagaacggaatatctttcagaccgtcccaatcaatgtaagtagttggtttcatatagtgctgttttataggtttgcagcaaatatacgaataaagtacgacctcaacaaataaaggtcgtatattttattctttatgtcgtttttaaagtgttaatttttattctttatgtcgtattaaagtattctttatgtcgtacttggagggcttttccctcgcataatgcgcgcgcgcgaggatagacatagatagtcgatgttaagatagaaacaggctcataagattgagattgcttccaaactttcggaaaaaacggatgaaaaacaaaagggaaaacaaagacaaagcccccttataagggggttgggggattgtgcggttattgaagcttttccccccgcgtgttaaagtatattaatttggttacaatatcggtagcaatggttacatttgtatcacaatcaaaaaagtttaagatatatgcaagtaattccattgagcaaatttcggacgaatcagacagcgacccttcttcgtgctattcagggagaatccgtctttctgacttcacgtatcggtgattttaaactggtgccagtgtccgtagaagaaaaaatagccactcgaataagagagggcttgaatgaagtgaaacgaatcgaagctggtgagcagccagccaagagcgcaaacgcatttcttgatgagctttgaagtaaagactaccccacattttgagagggaagcgaaaatccttgcaaaaaggtataagtcttttaaggctgacatgaaggattttatcgagtcattggaaaagaaccccatgcagggggatgaactgagcccaggtatccgtaaaataagacttgccattgtttctaagggaaagggtaagtctgggggagcacgtgttatcacatacacgatttgtgcatcggaaagtgaaggtcgtgtttatcttgtggatgtctatgataagtcagacttctctaccgtaagtgtatctattctaaaaaaaatcatatctgaacagggtatcctttgaccagtcagcgttagtgaagcgaactgtgttttttttctcttttcggtctgcaaaggtaactccacactccgaagccgtcaagggcttcgcaagttcggatctgaaaaaaatcctgagcagcttcgctgtgcggttttttccgctcgaacccttgaccgctctccgtgttccgttgtgggaatggcagggaaaaaagaaaaaagtgtgtggctatgcagtgtgttagcgctgtgtgtattcccatgcggta

SEQ ID NO: 258 - DNA, 4785 bp, Bacteroides thetaiotaomicron; identical to SEQ ID NO: 6
  source 1..4785: mol_type = genomic DNA

SEQ ID NO: 259 - DNA, 4148 bp, Bacteroides thetaiotaomicron; identical to SEQ ID NO: 7
  source 1..4148: mol_type = genomic DNA

SEQ ID NO: 260 - DNA, 2877 bp, Bacteroides thetaiotaomicron
  source 1..2877: mol_type = genomic DNA
ggagtgttgctgttctttagtcctcaaaaggcagttgtggtaaatctccttgttctttcatcacatctattgtacctttcagctttgttgatgtcgtcttatattgtggataattttcattaatgtaagttgttgcgaatgttaccctatcaccgttaaatacgcacatgggatttatgtagtattcaatatccgctctacctcttgctattatttcggcactgcaaagctcgcctaaagctctaaaaatggatacttctgaataccctgtttcttccttgcattcgtccataaaaaacataaagctgtcttgattaggttttagttggccaaggatatatttaaagactttgattgatgcaggctttaaatcaaaaaaagccttgaatcctgctaaaaagaacttcgcaaaactttctgtatctacggctttatttcgtataaatacagaattaccaagaatttccccattaccgtcaactgcttttagaatggctgattcatctttatttgttcccttaactgatttagaaacaagtgcactccctatattaactaatgcttgttttgcaaagggattttctttgttaagctcgaaatctgatagtttacgctttgtcatactctactttcattttcatggtgatttttgatagtaacagtaacattgaatgttattattactttcacaaagatagtaaaaaatgaaagtaatagtttcttttaatgtgttatttatgaaactttcactttcttactatgaaagtcccactttcatagtatgaaagtcgcctatattgattatcaataacttatgctatgtttctttcttaagctcttaaatacccccaaaaatgccattttttagcttattttctttcatcttctgcactttcaaaaattacccaaaaaatgaaactaaaagagccccttcaaaagaggggctctccacgtccacgtttgggtaagttttgcgttttaatgcaaccttaaaatttcagttcttatgaaaaaaaccttctgttgttgaaatgctcatccccaaaatagaaaaacaaccccaaaaaagcaaagagaaacaagggtttaacattgagcaacactccattgagtgagtgctgccgtttggtcgctcccccttgggggacgggagggtgttaaagcgaatagcctttgttatgtctgatatacctttcgggatgcagctttttgtgctgttcctcgataacccctctaagctgtgcattctcttttcgcaagcggtctgccttttcttcggcttgcagcttcgagttctggaagtattttagaactttctggctttgtttctccgcttcgtgcttgtaatgctctctcatttgggtaaaatcctcgtaaatcgccttattttgcttctcagcccatttttcacgcccgattaatggcggtgtgccgatttggggtgctcttgtttcgtaattcagctccatactgttactcggataaatgagccgttcctctatcctgccgtaatactcccttacactgtcatgggtggcggtgctgcctttaatacccctctgaagcccgaatttgttctgcatgacttttccgtaacagtcctgcaactccgacagcttgcgtctgtcacccatgacctctttggcggaaagtctgccgtccacggttaacggcacaacgacacaatgaatgtgcggtgtccgctcgtccatatgtagggtgaagtccacaacgtttctccccccgaaccgttcgctgacgaacctgtagttctcgttcatccattgagtgagcctttcgggattctccccgatagctgtcatttcctcgtgacttcctgtaagaactacattcaggtgggtaacggcatccttgcggatggctgtctttcccttgtaaccctcctgtatgcgtctgttgattctttcctgtaatgaccttcggttcttgaaattgtcatagacatagactttcccattctcgcccaaatggtaaaatagatttttttccgaaagtttcggatctgcattgaggactttctttgtccggtctatatggctgcccaatccgccggctttaccggctgttcctttttcgatgtgaagtactgcgaatcccatttcttttccctattgtttttttggtttagtaatgcaatcaaagagggcggaagccctcccctttcggcttgtccgaaagcccacacttcggaacgaagtatagtgggctatacttccattaacgaaagcgcacaacaaaagtaggcaaaacgcttggaaattccaaatgctttgcctacctttgctgctgaccaaacggtagccgaccgatacgggagagctgctgacattaaaaagccgctggagtgaattgacggattcccgacatctccagcggcttgatgtatgtaagggtagaacggcagggtttgaacctgcaacccctcctctaaaaattgagtgctctgtccagttgagctacgtttacccttagttccttattttgctttttgggcttctttcttgtcttggtggttgaagtaaaccactccgacaatggctattactgaaacaagtccaaacattaccaatgctcccatgtttattctcctttctttttgtctttaacaagccaaagacctgctaaaagggttactactattgacaacgaacctcccacgtatattacccacttttcttgcacatccccgaaaattgaagaaagcacgactgccgtagttatatacttggcaatgtccattagccattttcctaattcttttttcatactgcaaatataataatttaattggaattattgtttatccccctcccgtcccccaaagggggagcgaccaaacggcagcactcactcaat

SEQ ID NO: 261 - DNA, 1896 bp, Bacteroides thetaiotaomicron
  source 1..1896: mol_type = genomic DNA
aatcgagtaggaggaaaacgaagtagaagttttcctcctactttcgttttccgacctctcacaccaccgtacgtgccgttcggcatacggcggttctcttaactgcgatgcaattgggtataaagaattatcattgacggataacccgccattacaagcttatctgttgtgattgctctatgcaatatccaactatccgcaatgcgccaatagcctttacgggtattcgcccattcccaagatttccgacgagggatgccacacttctgcaagctggcaaaacgtgtacgtacccgcttccaactcttccatatatacattctaagacgacgattgtaccacttcgctgttttgattataaaatctttcatatcggcataacgatagtatgtcagccaacctcggatgtattgcgtcaggtggagtttcagccaagcgtagccttgaccactactacggctggtcaggtgcttgatggtgcgtttgaacttggattgacttttcttatgaagattaagaccacatttacggtcggctcttcagtagaaggagtgtccaagatacttcttgccgcagatggaaccgacttctgtcttctctttgtttactttcaagaataacttcttttctataaactcggaaatactatcacggactcgctccgttgcccgaagactatggacaaggatcagacaatcatcggcatagcggacaaacgggtgccccctgcgttccaattcctggtccaactcattaagaagaatattgctcaatataggactcaatggaccaccttgggggacgccctcggcagtctccgcgtatttgtgagatactacaactcctgcattaaggtatttgtgtatcaaagatattacactgccgtccttgacggttcgggataagacctctatcagtttgctgtggttaacacggtcaaagaacttttccaaatccaaaccgatacagtagcgataaccttggtctgcatattcctgcaccttatgcagtgcatcgtgagcactacgatgagggcggaagccgaagctgttgtcactgaactgaggttcgtaaagcggtatcaacacttggctgattgcctgctgaacaaagcggtctaccactgtcgggatacctaatgggcgagttttaccgttgtctttcggaatttctaacctgcgcacaggggacggacgatacttccccctgcgtatcttttccaacaattcgtctttatggagggtaaggtatggcaacagttcgctcgtctccatcttatcgacacctcccactcctccattccttacgacttggcggtatgccgcattcaagttcgatggacttagaaggagttccaacagattgttttcttccaattgcacttccacaagctgctcatcttttatctccataaaagtctgcactcccacatactcgtcggatgctgtcctatccatttgtgggcagttcgttttactgattttccgcattgactctttcataaagtattaaatggtacttgtttgattaaaagttcagtccttcaccgactgccgatttttttaccttgtcggttactatgacctctgctgacttctcacggttcgttattactgcttgactgtatttatttatttttcctcgcccgtgagacctccccagttatggacatattctttccatcttatgtctgcttgatttactttggatgttccggacaactataggacttcgttttgtttagcaaacttatccacatccttaagccttaatatcaagtttctgtacgtcagaccagatatttgccgcaggcttccttcagattccacctcacgatggacacccttgccgttggctatatacttcccgttgtcagggcgctttagggacttacac

SEQ ID NO: 262 - DNA, 674 bp, Bacteroides thetaiotaomicron
  source 1..674: mol_type = genomic DNA
gatgtgttcaagaatatagctgacgccgccggtagcagcagcgtcagacggggctttgccgaccttttttcagcctccaaggcggctttggacgagattcaggcgggtctgggcggaatccttccttccatgccgggtatgcctgtcgccaagttcggcgacctgtccatcgggatagacatgcatcctaccgttacccctccctctcccatcatgcctgtgcctcatgtaggcaaggtgtacgacctcatggcagacctcatggccggcatggcggctgccatgccgcctgcggctgatggagtggccggagtggcgtgcaacatcctcaagagcatggctccgtcggtcaaggtgcataaccagtggattgcgcaggcaggtatcggcatcgtgcatctgccggcatttgtattgcatccggccccgttggtcagcggtatgtccgagtccgagatgtggatgggcagttccactgtcctggcggacggtgcgccctgttcctccctcacacatccggcactctcatgcaacattgtgggaataccgacgattccccgcaaggggaagcccaggaaggtgagcaaggccctgcttgcccccacttccatgctctccaccatcacatccgtaggaaatcccgtgcttgtgggaggaccgcctaccattgatgt

SEQ ID NO: 263 - DNA, 493 bp, Bacteroides thetaiotaomicron
  source 1..493: mol_type = genomic DNA
aggaccgtcaaaacggtattgcaacccccggatgtccgtaagcaggtaaccccggccatcgagtgtccaagacaactgttccttgcggtcaaaataggaatctccgggtttcagtacgggcaggaaagactcccgtccgtcagcatggcggaatgcgaacgccccttcctccagctgccgtattcccagattgtagctgtggtgccagttgtatcccaacggaccgtccacggcggcatcactgtaataggtacgttcccatacgacgggaatcggccccggaagctcaaagtccacattggtgtgatagaccctgcccgtagcagcgtccaccggctcgccgaaagtcttgcacttgatgggctggagaatgtccgccagcctgttcatgccttttttcctcagcctgtcgattaggttttggaagcggtcgcctatcttcttccacatcttgcccaagcctttcagtccgaacttcatcgccagcgcaaat

SEQ ID NO: 264 - DNA, 407 bp, Bacteroides thetaiotaomicron
  source 1..407: mol_type = genomic DNA
ccgtcctggtacattcacgatttctaatgaaaaggtgaatattctggaagctttggctatggcaggtgatatgactgtatatggtctgcgtgatgatgtaaagctgatacgggagaatgccaatggtaagcaggaaattattcctttggatctgaacaaggcggaaactattctttctccttattactatttgcagcagaatgatatcatctacgtaactccgaataaggcgaaagctcgaaattcggatatcggtactagtacaagtttgtggttctctgctacttcgatccttgtttctattgccagtttattgtttaacatcttgaaataaaaagaaagagttatgaaggaagaaaatcaaaacgtgaaggaacgtgaaatggctgaggatcagatcgatttcc

SEQ ID NO: 265 - DNA, 260 bp, Bacteroides thetaiotaomicron
  source 1..260: mol_type = genomic DNA
ttgctgacatccagcgcgtcaatggtttccaccatgtcgccccggtcatcgtaacggtagcggaccagcttcacctcctcaccgtcctgatttacggaaacgcagagcacccgccccgactcgtcggtttccactttcaggaattctccccgtgaggatatgattcctgccagccttccccccgaagcgtattcgaagcggagccggaatccgtccttcgtggaaatgcccgataccatgcggtaaccggagcggttttc

SEQ ID NO: 266 - DNA, 235 bp, Bacteroides thetaiotaomicron
  source 1..235: mol_type = genomic DNA
cccggaacctcctcctccgggcgttgtcggtttctgatactccgcctgctgcttcaattggctgtcgagtttcagattggtcgttgataagtttcctgtggcacgtgctttgagtcgcatacctgtgatgttcttctccagcgagaactcttccagcgttccggcagccttgctgcggattcctacaccgaagatggctagatcatcaattttcacacttttgccatcgagcagt

SEQ ID NO: 267 - DNA, 227 bp, Bacteroides thetaiotaomicron
  source 1..227: mol_type = genomic DNA
cacctgctggtacagcttaccaaccaagggggtatgtccttccattgggaatacgagggtaagggtgagaatgcccgctgtgtgcatacatggggcgatggaggcgtgatggaatatttcatccgttacggtaagggatatacccatatccgcaatggggaaaatgccgaaaccgaatattattacggtgaggacaaactcatctacaagatagtggatgccaacgg

SEQ ID NO: 268 - DNA, 185 bp, Bacteroides thetaiotaomicron
  source 1..185: mol_type = genomic DNA
ttctaacggtcgtcccgggtgtatttccccatcacgtgtgatgtagaaatggtaaccgatgtcacggaatccccgatgttgaatgtgatcctgtcggcaagcctccgccgagagggcttttccctctggcgtggcactgcaatgaatgataatcagtgtgatggtccgcataagtttacatacaa

SEQ ID NO: 269 - DNA, 119 bp, Bacteroides thetaiotaomicron
  source 1..119: mol_type = genomic DNA
gttatagtctgttattccctgataaaacgtaggtaatgtgaatatattttgttacttttgtgactgtaaaacagaaacttatttgtcatgatagaattcaaaatacgtgcttatggtcg

SEQ ID NO: 270 - DNA, 103 bp, Bacteroides thetaiotaomicron
  source 1..103: mol_type = genomic DNA
ctttgtactcctatcaaaccacctacagcagtagcgacagtgatgattactttgataatgaaactccaaacggaacgggatgatgaattactcatagtttttg

SEQ ID NO: 271 - DNA, 103 bp, Bacteroides thetaiotaomicron
  source 1..103: mol_type = genomic DNA
tgacatgtgttcggcaagtttggcaaggtcgaaagtctcgtcgcttaccgcccgggcgaaccatttgcccgcattcaagcctttcttctgttggttctgatag

SEQ ID NO: 272 - DNA, 101 bp, Bacteroides thetaiotaomicron
  source 1..101: mol_type = genomic DNA
agcgtacgtgtatctttcgcttgtccttccgcatccagtcctccttcgtaacagattcctatggaatgtgtgttatgattccggcaatgtgctccgacctt
